(19) United States
(12) Patent Application Publication
(10) Pub. No.: US 2015/0218595 A1
(43) Pub. Date: Aug. 6, 2015

(54) FERMENTATIVE PRODUCTION OF ALCOHOLS

(71) Applicant: Butamax Advanced Biofuels LLC, Wilmington, DE (US)

(72) Inventors: Bhaskar Bhadra, Secundrabad (IN); Lixuan Lisa Huang, Hockessin, DE (US)

(73) Assignee: Butamax Advanced Biofuels LLC, Wilmington, DE (US)

(21) Appl. No.: 14/422,282

(22) PCT Filed: Aug. 22, 2013
(86) PCT No.: PCT/US13/56142

§ 371 Date: Feb. 18, 2015

Related U.S. Application Data
(60) Provisional application No. 61/691,839, filed on Aug. 22, 2012.

(51) Int. Cl. C12P 7/16; C12N 9/88; C07K 14/395

(52) U.S. Cl. CPC C12P 7/16; C07K 14/395; C12N 9/88; C12Y 401/01001

(57) ABSTRACT

The invention relates to the development of microorganisms capable of producing fermentation products via an engineered pathway in the microorganisms. The invention also relates to microorganisms with improved cell viability and methods to improve cell viability and cell productivity of a microorganism.

[0001] This application claims the benefit of U.S. Provisional Application No. 61/691,839, filed on Aug. 22, 2012; the entire contents of which are herein incorporated by reference.

[0002] The Sequence Listing associated with this application is filed in electronic form via EFS-Web and hereby incorporated by reference into the specification in its entirety.

### FIELD OF THE INVENTION

[0003] The invention relates to the development of microorganisms capable of producing fermentation products via an engineered pathway in the microorganisms. The invention also relates to microorganisms with improved cell viability and methods to improve cell viability and cell productivity of a microorganism.

### BACKGROUND OF THE INVENTION

[0004] A number of chemicals and consumer products may be produced utilizing fermentation as the manufacturing process. For example, alcohols such as ethanol and butanol have a variety of industrial and scientific applications such as fuels, reagents, and solvents. Butanol is an important industrial chemical useful as a fuel additive, as a feedstock chemical in the plastics industry, and as a food grade extractant in the food and flavor industry. Each year 10 to 12 billion pounds of butanol are produced by chemical syntheses using starting materials derived from petrochemicals. The production of butanol or butanol isomers from materials such as plant-derived materials could minimize the use of petrochemicals and would represent an advance in the art. Furthermore, production of chemicals and fuels using plant-derived materials or other biomass sources would provide eco-friendly and sustainable alternatives to petrochemical processes.

[0005] Techniques such as genetic engineering and metabolic engineering may be utilized to modify a microorganism to produce a certain product from plant-derived materials or other sources of biomass. The microorganism may be modified, for example, by the insertion of genes such as the insertion of genes encoding a biosynthetic pathway, deletion of genes, or modifications to regulatory elements such as promoters. A microorganism may also be engineered to improve cell productivity and yield, to eliminate by-products of biosynthetic pathways, and/or for strain improvement. Examples of microorganisms expressing engineered biosynthetic pathways for producing butanol isomers, including isobutanol, are described in U.S. Pat. Nos. 7,851,188 and 7,993,889.

[0006] However, exposure to alcohols such as ethanol and butanol during fermentation can have a negative impact on cell viability, cell productivity, and product yield. The accumulation of these alcohols can inhibit cell growth and eventually affect the fermentative production of these alcohols. As such, there is a need to develop microorganisms that exhibit improved cell growth and production in the presence of these alcohols as well as methods that maintain and/or improve cell viability and cell productivity.

[0007] The present invention is directed to the development of such methods as well as the development of microorganisms with improved cell viability and cell productivity and capable of producing fermentation products via an engineered pathway in the microorganisms.

### SUMMARY OF THE INVENTION

[0008] The present invention is directed to a recombinant host cell comprising modified yeast activator protein and/or yeast activator protein activity. In some embodiments, the recombinant host cell may produce a fermentation product such as an alcohol. In some embodiments, the recombinant host cell may comprise a modification in a polynucleotide encoding a polypeptide having yeast activator protein activity. In some embodiments, the recombinant host cell may comprise a deletion, mutation, insertion, substitution, and/or overexpression of a polynucleotide encoding a polypeptide having yeast activator protein activity. In some embodiments, the recombinant host cell may comprise a deletion, mutation, insertion, substitution, and/or overexpression of one or more polynucleotides encoding a polypeptide having yeast activator protein activity. In some embodiments, the recombinant host cell may comprise one or more deletions, mutations, insertions, and/or substitutions of a polynucleotide encoding a polypeptide having yeast activator protein activity. In some embodiments, the recombinant host cell may comprise one or more deletions, mutations, insertions, and/or substitutions of one or more polynucleotides encoding a polypeptide having yeast activator protein activity. In some embodiments, the polypeptide having yeast activator protein activity may be Yap1, Yap2, Yap3, Yap4, Yap5, Yap6, Yap7, or Yap8.

[0009] In some embodiments, the recombinant host cell may comprise one or amino acid substitutions in a polypeptide having yeast activator protein activity. In some embodiments, the recombinant host cell may comprise an amino acid substitution in a Yap1 polypeptide at residues 80, 132, 168, 237, 254, 257, 297, 302, 367, 404, 411, 444, 487, 498, 499, 548, 584, 617, and/or 636, or combinations thereof. In some embodiments, the recombinant host cell may comprise one or more amino acid substitutions in a Yap1 polypeptide at residues 80, 132, 168, 237, 254, 257, 297, 302, 367, 404, 411, 444, 487, 498, 499, 548, 584, 617, and/or 636, or combinations thereof. In some embodiments, the amino acid substitution may be a polar amino acid, nonpolar amino acid, basic amino acid, or acidic amino acid. In some embodiments, the recombinant host cell may comprise one or more sequences selected from SEQ ID NO: 2, 3, 4, 5, 6, 7, 8, 9, 10, 11, 12, 13, 14, 15, 16, 17, 18, 19, 20, 21, 22, 23, 24, 25, 26, and 27. In some embodiments, the recombinant host cell may comprise one or more amino acid insertions in a polypeptide having yeast activator protein activity. In some embodiments, the recombinant host cell may comprise a yeast activator protein comprising one or more amino acid insertions of tripeptide repeat units selected from Ser-Thr-Asp and Ser-Asp-Gly.

[0010] In some embodiments, the recombinant host cell may further comprise a butanol biosynthetic pathway (e.g., an engineered butanol pathway). In some embodiments, the butanol biosynthetic pathway may be an isobutanol biosynthetic pathway. In some embodiments, the isobutanol biosynthetic pathway may comprise a polynucleotide encoding a polypeptide that catalyzes a substrate to product conversion selected from the group consisting of:

[0011] (a) pyruvate to acetolactate;

[0012] (b) acetolactate to 2,3-dihydroxyisovalerate;

[0013] (c) 2,3-dihydroxyisovalerate to α-ketoisovalerate;

[0014] (d) α-ketoisovalerate to isobutyraldehyde; and

[0015] (e) isobutyraldehyde to isobutanol.

[0016] In some embodiments, the isobutanol biosynthetic pathway may comprise a polynucleotide encoding a polypeptide that catalyzes a substrate to product conversion selected from the group consisting of:

[0017] (a) pyruvate to acetolactate;

[0018] (b) acetolactate to 2,3-dihydroxyisovalerate;

[0019] (c) 2,3-dihydroxyisovalerate to α-ketoisovalerate;

[0020] (d) α-ketoisovalerate to valine;

[0021] (e) valine to isobutylamine;

[0022] (f) isobutylamine to isobutyraldehyde; and

[0023] (g) isobutyraldehyde to isobutanol.

[0024] In some embodiments, the isobutanol biosynthetic pathway may comprise a polynucleotide encoding a polypeptide that catalyzes a substrate to product conversion selected from the group consisting of:

[0025] (a) pyruvate to acetolactate;

[0026] (b) acetolactate to 2,3-dihydroxyisovalerate;

[0027] (c) 2,3-dihydroxyisovalerate to α-ketoisovalerate;

[0028] (d) α-ketoisovalerate to isobutyryl-CoA;

[0029] (e) isobutyryl-CoA to isobutyraldehyde; and

[0030] (f) isobutyraldehyde to isobutanol.

[0031] In some embodiments, the isobutanol biosynthetic pathway may comprise one or more polynucleotides encoding polypeptides having acetolactate synthase, acetohydroxy acid reductoisomerase, acetohydroxy acid dehydratase, keto acid decarboxylase, alcohol dehydrogenase, keto acid reductoisomerase, dihydroxy acid dehydratase, valine dehydrogenase, valine dehydrogenase, omega transaminase, ketoisovalerate decarboxylase, and/or aldehyde dehydrogenase activity.

[0032] In some embodiments, the butanol biosynthetic pathway may be a 1-butanol biosynthetic pathway. In some embodiments, the 1-butanol biosynthetic pathway may comprise a polynucleotide encoding a polypeptide that catalyzes a substrate to product conversion selected from the group consisting of:

[0033] (a) acetyl-CoA to acetoacetyl-CoA;

[0034] (b) acetoacetyl-CoA to 3-hydroxybutyryl-CoA;

[0035] (c) 3-hydroxybutyryl-CoA to crotonyl-CoA;

[0036] (d) crotonyl-CoA to butyryl-CoA;

[0037] (e) butyryl-CoA to butyraldehyde; and

[0038] (f) butyraldehyde to 1-butanol.

[0039] In some embodiments, the 1-butanol biosynthetic pathway may comprise one or more polynucleotides encoding polypeptides having acetyl-CoA acetyltransferase, 3-hydroxybutyryl-CoA dehydrogenase, crotonase, butyryl-CoA dehydrogenase, butyraldehyde dehydrogenase, and/or butanol dehydrogenase activity.

[0040] In some embodiments, the butanol biosynthetic pathway may be a 2-butanol biosynthetic pathway. In some embodiments, the 2-butanol biosynthetic pathway may comprise a polynucleotide encoding a polypeptide that catalyzes a substrate to product conversion selected from the group consisting of:

[0041] (a) pyruvate to alpha-acetolactate;

[0042] (b) alpha-acetolactate to acetoin;

[0043] (c) acetoin to 3-amino-2-butanol;

[0044] (d) 3-amino-2-butanol to 3-amino-2-butanol phosphate;

[0045] (e) 3-amino-2-butanol phosphate to 2-butanone; and,

[0046] (f) 2-butanone to 2-butanol.

[0047] In some embodiments, the 2-butanol biosynthetic pathway may comprise a polynucleotide encoding a polypeptide that catalyzes a substrate to product conversion selected from the group consisting of:

[0048] (a) pyruvate to alpha-acetolactate;

[0049] (b) alpha-acetolactate to acetoin;

[0050] (c) acetoin to 2,3-butanediol;

[0051] (d) 2,3-butanediol to 2-butanone; and

[0052] (e) 2-butanone to 2-butanol.

[0053] In some embodiments, the 2-butanol biosynthetic pathway may comprise polynucleotides encoding polypeptides having acetolactate synthase, acetolactate decarboxylase, butanediol dehydrogenase, dial dehydratase, acetonin aminase, aminobutanol kinase, aminobutanol phosphate phosphorylase, and/or butanol dehydrogenase activity.

[0054] In some embodiments, the biosynthetic pathway may be a 2-butanone biosynthetic pathway. In some embodiments, the 2-butanone biosynthetic pathway may comprise a polynucleotide encoding a polypeptide that catalyzes a substrate to product conversion selected from the group consisting of:

[0055] (a) pyruvate to alpha-acetolactate;

[0056] (b) alpha-acetolactate to acetoin;

[0057] (c) acetoin to 3-amino-2-butanol;

[0058] (d) 3-amino-2-butanol to 3-amino-2-butanol phosphate; and

[0059] (e) 3-amino-2-butanol phosphate to 2-butanone.

[0060] In some embodiments, the 2-butanone biosynthetic pathway may comprise a polynucleotide encoding a polypeptide that catalyzes a substrate to product conversion selected from the group consisting of:

[0061] (a) pyruvate to alpha-acetolactate;

[0062] (b) alpha-acetolactate to acetoin;

[0063] (c) acetoin to 2,3-butanediol; and

[0064] (d) 2,3-butanediol to 2-butanone.

[0065] In some embodiments, the 2-butanone biosynthetic pathway may comprise polynucleotides encoding polypeptides having acetolactate synthase, acetolactate decarboxylase, butanediol dehydrogenase, acetonin aminase, aminobutanol kinase, aminobutanol phosphate phosphorylase, and/or diol dehydratase activity.

[0066] In some embodiments, the engineered butanol pathway of the microorganism comprises at least one polypeptide selected from the group of enzymes having the following Enzyme Commission Numbers: EC 2.2.1.6, EC 1.1.1.86, EC 4.2.1.9, EC 4.1.1.72, EC 1.1.1.1, EC 1.1.1.265, EC 1.1.1.2, EC 1.2.4.4, EC 1.3.99.2, EC 1.2.1.57, EC 1.2.1.10, EC 2.6.1.66, EC 2.6.1.42, EC 1.4.1.9, EC 1.4.1.8, EC 4.1.1.14, EC 2.6.1.18, EC 2.3.1.9, EC 2.3.1.16, EC 1.1.130, EC 1.1.1.35, EC 1.1.1.157, EC 1.1.1.36, EC 4.2.1.17, EC 4.2.1.55, EC 1.3.1.44, EC 1.3.1.38, EC 5.4.99.13, EC 4.1.1.5, EC 2.7.1.29, EC 1.1.1.76, EC 1.2.1.57, and EC 4.2.1.28.

[0067] In some embodiments, the engineered butanol pathway of the microorganism comprises at least one polypeptide selected from the following group of enzymes: acetolactate synthase, acetohydroxy acid isomeroreductase, acetohydroxy acid dehydratase, branched-chain alpha-keto acid decarboxylase, branched-chain alcohol dehydrogenase, acylating aldehyde dehydrogenase, branched-chain keto acid dehydrogenase, butyryl-CoA dehydrogenase, butyraldehyde dehydrogenase, transaminase, valine dehydrogenase, valine decarboxylase, omega transaminase, acetyl-CoA acetyltransferase, 3-hydroxybutyryl-CoA dehydrogenase, crotonase, butyryl-CoA dehydrogenase, isobutyryl-CoA mutase, acetolactate decarboxylase, acetonin aminase, butanol dehydrogenase, butyraldehyde dehydrogenase, acetoin kinase, acetoin phosphate aminase, aminobutanol phosphate phospholyase, aminobutanol kinase, butanediol dehydrogenase, and butanediol dehydratase.

[0068] In some embodiments, one or more of the substrate to product conversions utilizes NADH or NADPH as a cofactor. In some embodiments, the NADH is the preferred cofactor for either step b or e or both.

[0069] In some embodiments, the recombinant host cell may further comprise a modification in a polynucleotide encoding a polypeptide having pyruvate decarboxylase activity. In some embodiments, the recombinant host cell may comprise a deletion, mutation, insertion, and/or substitution in an endogenous polynucleotide encoding a polypeptide having pyruvate decarboxylase activity. In some embodiments, the recombinant host cell may comprise a deletion, mutation, insertion, and/or substitution in one or more endogenous polynucleotides encoding a polypeptide having pyruvate decarboxylase activity. In some embodiments, the recombinant host cell may comprise one or more deletions, mutations, insertions, and/or substitutions in an endogenous polynucleotide encoding a polypeptide having pyruvate decarboxylase activity. In some embodiments, the recombinant host cell may comprise one or more deletions, mutations, insertions, and/or substitutions in one or more endogenous polynucleotides encoding a polypeptide having pyruvate decarboxylase activity. In some embodiments, the polypeptide having pyruvate decarboxylase activity may be PDC1, PDC5, PDC6, or combinations thereof. In some embodiments, the endogenous polynucleotide encoding a polypeptide having pyruvate decarboxylase activity may be PDC1, PDC5, PDC6, or combinations thereof. In some embodiments, the recombinant host cell may comprise a deletion, mutation, insertions, and/or substitution in one or more endogenous polynucleotides encoding FRA2, GPD2, BDH1, and YMR.

[0070] In some embodiments, the recombinant host cell may be a yeast cell. In some embodiments, the yeast cell may be a member of a genus of yeast such as Saccharomyces, Schizosaccharomyces, Hansenula, Candida, Kluyveromyces, Yarrowia, Issatchenkia, or Pichia. In some embodiments, the microorganism is Saccharomyces cerevisiae.

[0071] The present invention is also directed to a recombinant host cell comprising one or more modified components of a stress pathway and/or modified activity of components of a stress pathway. In some embodiments, the recombinant host cell may produce a fermentation product such as an alcohol. In some embodiments, the recombinant host cell may comprise a modification in a polynucleotide encoding a polypeptide having activity of components of a stress pathway. In some embodiments, the recombinant host cell may comprise a deletion, mutation, insertion, and/or substitution in an endogenous polynucleotide encoding a polypeptide having activity of components of a stress pathway. In some embodiments, the recombinant host cell may comprise a deletion, mutation, insertion, and/or substitution in one or more endogenous polynucleotides encoding a polypeptide having activity of components of a stress pathway. In some embodiments, the recombinant host cell may comprise one or more deletions, mutations, insertions, and/or substitutions in an endogenous polynucleotide encoding a polypeptide having activity of components of a stress pathway. In some embodiments, the recombinant host cell may comprise one or more deletions, mutations, insertions, and/or substitutions in one or more endogenous polynucleotides encoding a polypeptide having activity of components of a stress pathway. In some embodiments, the polypeptide may be Yap1, Yap2, Yap3, Yap4, Yap5, Yap6, Yap7, Yap8, Ybp1, Trx2, Gsh1, Gsh2, Trr1, Gpx2, Tsa1, Ahp1, Glr1, or combinations thereof.

[0072] The present invention is also directed to a method for improving cell viability comprising modifying one or more components of a stress response pathway. In some embodiments, the one or more components of a stress response pathway may be Yap1, Yap2, Yap3, Yap4, Yap5, Yap6, Yap7, Yap8, Ybp1, Trx2, Gsh1, Gsh2, Trr1, Gpx2, Tsa1, Ahp1, Glr1, or combinations thereof.

[0073] The present invention is also directed to a process for producing an alcohol comprising (a) providing a recombinant host cell as described herein, wherein the host cell produces an alcohol; (b) contacting the recombinant host cell with one or more carbon substrates under conditions wherein the alcohol is produced; and (c) recovering the alcohol. In some embodiments, the alcohol may be selected from methanol, ethanol, propanol, butanol, pentanol, and hexanol. In some embodiments, butanol may be selected from 1-butanol, 2-butanol, 2-butanone, isobutanol, tert-butanol, or mixtures thereof.

[0074] The present invention is also directed to an isolated polynucleotide comprising a nucleotide sequence encoding the polypeptide set forth in SEQ ID NO: 2-38. Another embodiment of the present invention is directed to isolated polynucleotide comprising a nucleotide sequence encoding a variant of the polypeptide set forth in SEQ ID NO: 19-27. The present invention is also directed to an isolated polynucleotide comprising a nucleotide sequence selected from the group consisting of: a) a nucleotide sequence encoding the polypeptide set forth in SEQ ID NO: 2-38; b) a nucleotide sequence encoding a polypeptide having at least 95% sequence identity to SEQ ID NO: 2-38; wherein the polynucleotide encodes a polypeptide that when expressed in a host cell thereof improves the tolerance of the host cell to oxidative stress.

[0075] Other embodiments of the present invention include an expression cassette comprising the isolated polynucleotide of SEQ ID NO: 2-38, wherein the polynucleotide is operably linked to a promoter; and a composition comprising a recombinant host cell described herein.

[0076] The present invention is also directed to a composition comprising a recombinant host cell as described herein.

[0077] In some embodiments, the carbon substrate is one or more of the following: oligosaccharides, polysaccharides, monosaccharides, and/or mixtures thereof. In some embodiments, the carbon substrate is one or more of the following: fructose, glucose, lactose, maltose, galactose, sucrose, starch, cellulose, feedstocks, ethanol, lactate, succinate, glycerol, corn mash, sugar cane, biomass, a C5 sugar such as xylose and arabinose, and/or mixtures thereof.

[0078] In some embodiments, the first contacting with the carbon substrate occurs in the presence of an extractant. In some embodiments, the first contacting with the carbon substrate occurs in anaerobic conditions. In some embodiments, the first contacting with the carbon substrate occurs in microaerobic conditions. In some embodiments, recycling occurs in anaerobic conditions. In some embodiments, recycling occurs in microaerobic conditions.

### DESCRIPTION OF THE DRAWINGS

[0079] FIG. 1 illustrates the regulation of Yap1 in the oxidative stress response pathway.

[0080] FIGS. 2A and 2B illustrate the sequence alignment of Yap1 from several strains of Saccharomyces cerevisiae.

### DESCRIPTION OF THE INVENTION

[0081] This invention is directed to microorganisms that produce fermentation products and optimizations for producing fermentation products such as butanol at high rate and titers with advantaged economic process conditions.

[0082] During fermentative production of some fermentation products such as alcohols, microorganisms may be subjected to various stress conditions including, for example, product toxicity (e.g., alcohol toxicity), oxidative stress, osmotic stress, and fluctuations in pH, temperature, and nutrient availability. The impact of these stress conditions can cause an inhibition of cell growth and decreased cell viability which can ultimately lead to a reduction in fermentation productivity and product yield. The ability to adapt to these stress conditions by adjusting the metabolic processes of the microorganism is advantageous to maintain efficient production. For example, when exposed to a particular stressing agent, a microorganism may response to these stress conditions by modifying certain metabolic processes such as growth, signal transduction, transcription, and/or posttranslational activities.

[0083] Yeast activator proteins (Yap) are basic leucine zipper (b-ZIP) transcription factors that are implicated in various stress responses. There are a number of yeast activator proteins including Yap1, which functions as a modulator of oxidative stress in Saccharomyces cerevisiae. Yap1 also plays a role in the cellular response to amino acid starvation and cytotoxic agents such as hydrogen peroxide. Other yeast activator proteins include Yap2 which has a role in response to toxic compounds such as cadmium, Yap4 and Yap6 are involved in the response to osmotic stress, Yap5 is involved in iron metabolism, and Yap8 is involved in arsenic detoxification (see, e.g., Rodrigues-Pousada, et al., Yeast 27:245-258, 2010). Additional yeast activator proteins include Yap3 and Yap7.

[0084] Yap1 regulates the expression of genes associated with tolerance to oxidative stress by activating transcription via binding to specific DNA sequences localized in the promoters of these regulated genes. The consensus element, known as the Yap1 response element (YRE), is 5′-TT/GAC/GTAA, and has been identified in the promoters of γ-glutamylcysteine synthase 1 (GSH1), thioredoxin 2 (TRX2), yeast cadmium factor gene (YCF1), glutathione reductase (GLR1), and multidrug resistance transporter (ATR1).

[0085] Control of Yap1-mediated gene regulation is accomplished through its cellular relocation (see FIG. 1). Yap1 is located in both the cytoplasm and nucleus, and in the absence of oxidative stress, Yap1 enters the nucleus at a relatively low basal rate compared with its nuclear export. The nuclear export of Yap1 is mediated by the nuclear export protein, Cmr1. Cmr1 binds to the nuclear export signal (NES) that overlaps with a cysteine-rich domain (CRD) located in the C-terminal domain of Yap1. The reduced form of Yap1 binds with Cmr1 forming a Yap1-Cmr1 complex, and is then exported from the nucleus to the cytoplasm. Oxidation of the cysteine residues in the CRD prevents the interaction of Yap1 with Cmr1, resulting in the accumulation of Yap1 in the nucleus and enhanced expression of the genes associated with tolerance to oxidative stress.

[0086] Deactivation of Yap1 is mediated by a thioredoxin system, suggesting that localization of Yap1 is regulated by a negative feedback loop. Thioredoxin reduces the intramolecular disulfide bonds, resulting in the cytoplasmic relocation of Yap1. That is, Cmr1 can bind to the reduced Yap1 and the Yap1-Cmr1 complex is exported to the cytoplasm (see, e.g., Toone, et al., Oncogene 20:2336-2346, 2001). Of note, there are several mechanisms for activation and deactivation of Yap1, and these mechanisms appear to depend, for example, on the stress conditions (e.g., the presence of oxidants).

[0087] As an example of a Yap1 activation mechanism, in the presence of hydrogen peroxide (H₂O₂), glutathione-dependent peroxidase (Gpx3) is oxidized via a cysteine residue to form a sulfoxide. This sulfoxide group of Gpx3 interacts with a cysteine residue in the C-terminal CRD (C-CRD) of Yap1 in the presence of a Yap1-binding protein (Ybp1), forming a disulfide bond between Gpx3 and Yap1. Reduction of this intermolecular disulfide bond leads to the release of Gpx3 and the formation of intramolecular disulfide bonds in Yap1 (i.e., disulfide bonds form between cysteine residues in the C-CRD and cysteine residues in the N-terminal CRD, N-CRD) that masks the NES site, thus interfering with the binding of Cmr1 (see, e.g., Lushchak, Biochem. 75:281-296, 2010; Gulshan, et al., J. Biol. Chem. 286:34071-34081, 2011).

[0088] Another oxidizing agent, diamide, appears to oxidize particular cysteine residues in the CRD of Yap1 and thus inhibit association with Crm1 exportin. Ybp1 is not required for diamide resistance; however, studies indicate that Ybp1 is rate-limiting for Yap1 oxidative folding during H₂O₂ stress in Candida glabrata (Gulshan, et al., 2011, supra). Overproduction of CgYbp1 (Candida glabrata Ybp1) resulted in an elevated H₂O₂ tolerance in Candida glabrata indicating that the role of Ybp1 in H₂O₂ resistance has been evolutionarily conserved. In other studies, deletion of YAP1 caused an increased cellular sensitivity to a variety of DNA damaging agents (see, e.g., Zhang, et al., Toxicol. Sci. 120:310-321, 2011). In addition to oxidative stress, Yap1 also accumulated in the nucleus of cells transferred from a glucose-rich medium to medium containing glycerol or no carbon source, and cells exposed to heavy metals such as arsenic (see, e.g., Wiatrowski, et al., Eukaryot. Cell 2:19-26, 2003; Menezes, et al., Biochem. J. 414:301-311, 2008). During pre-oxygenation in brewery fermentations, the expression of YAP1 increased in the early stage of oxygenation indicating the development of a stress response and resistance against stress conditions (see, e.g., Verbelen, et al., FEMS Yeast Res. 9: 226-239, 2009).

[0089] Other genes involved in response to oxidative stress include, for example, thioredoxin 2 (TRX2), γ-glutamylcysteine synthase 1 (GSH1), glutathione synthase (GSH2), thioredoxin reductase (TRR1), glutathione peroxidase (GPX2), glutathione oxidoreductase (GLR1), thioredoxin peroxidase (TSA1), and alkylhydroperoxide reductase (AHP1); and TRR1, TRX2, GSH1, and GLR1 are regulated by Yap1 (see, e.g., Kuge, et al., EMBO J. 13:655-664, 1994; Morgan, et al., EMBO J. 16:1035-1044, 1997; Lee, et al., J. Biol. Chem. 274:16040-16046, 1999). In addition, YAP1 and other transcription factors such as PDR1, PDR3, RPN4, and HSF1 appear to play key regulatory roles for the global adaptation of Saccharomyces cerevisiae to lignocellulosic-derived inhibitors (see, e.g., Ma, et al., BMC Genomics 11:660, 2010).

[0090] The YAP1 gene is highly conserved among various species of Saccharomyces cerevisiae. However, there is less homology between Saccharomyces cerevisiae and other fungi, with most homology located at the N- and C-terminus. The YAP1 gene contains a nuclear localization signal sequence at its N-terminus (NLS) and an NES sequence at the C-terminus. Sequence alignment of YAP1 genes from several Saccharomyces cerevisiae strains revealed a sequence motif that differentiates the different Yap1 proteins. This motif consists of tripeptide repeat units of Ser-Thr-Asp (“STD”) or Ser-Thr-Gly (“STG”). For example, Yap1 from yeast strain, CEN.PK 113-7D consists of four tripeptide units (amino acid residues S394 to G405) and Yap1 from yeast strain, Saccharomyces cerevisiae PNY827 (ATCC® Patent Deposit Designation: PTA-12105) consists of six tripeptide units (amino acid residues S394 to G411). The nucleotide sequence of this tripeptide repeat region is either duplicate or triplicate of the sequence 5′-atagcactggtagcactg-3′(SEQ ID NO: 1). The YAP1 gene from CEN.PK 113-7D contains a duplication of this sequence motif from nt 1178 to nt 1213, and the YAP1 gene from PNY827 contains an additional copy of the sequence repeat from nt 1214 to nt 1231. This translates into the additional two tripeptide units in Yap1 from PNY827.

[0091] A summary of the number of STD/STG repeat motifs from several Saccharomyces cerevisiae strains is listed in Table 1 and the sequence alignment of Yap1 from several Saccharomyces cerevisiae strains is shown in FIGS. 2A and 2B. The repeat number identified in Table 1 is the total number of tripeptide units of either Ser-Thr-Asp or Ser-Thr-Gly sequence motifs.

TABLE 1

| | | STD/STG |
|---|---|---|
| Strain | Description | repeat no. |
| AWRI1631 | Wine | 6 |
| AWRI796 | Wine | 7 |
| CLIB215 | Baker's Yeast | 6 |
| EC1118 | Champagne | 5 |
| EC9-8 | Cd Resistant Clone | 4 |
| Foster B | Brewing (ale) | 4 |
| Foster O | Brewing (ale) | 4 |
| JAY291 | Haploid Derivative of PE-2 | 4 |
| | (sugar cane fermentation) | |
| Kyokai 7 | Sake | 6 |
| Lalvin QA23 | Wine | 6 |
| PW5 | Raphia Palm Wine | 4 |
| RM11-1a | Natural isolate from a California vinyard | 7 |
| UC5 | Sake | 6 |
| Vin 13 | Wine | 5 |
| YJM789 | Isolated from the lung of an AIDS patient | 4 |
| YJM269 | Isolated from grapes | 4 |
| S288C | Saccharomyces cerevisiae lab strain | 4 |
| W303 | Saccharomyces cerevisiae lab strain | 4 |
| CEN.PK 113-7D | CBS 8340 | 4 |

[0092] Several laboratory strains, including S288C, W303, and CEN.PK 113-7D each have four tripeptide units. Strains associated with ethanol production, for example, wine and sake strains, tend to have higher number of tripeptide units, ranging from five to seven tripeptide units. Some beer brewing strains (Foster B and Foster O) and a sugar cane fermentation strain (JAY291) each have four tripeptide units. Due to the high alcohol content of wine and sake strains, it is likely that the higher number of tripeptide units may be associated with higher stress tolerance and the robustness of the fermentation strains. The increased number of tripeptide units may have evolved through certain lineages of alcohol fermentation strains as a mechanism for increasing strain tolerance, growth, and/or productivity.

[0093] Transferring a YAP1 gene with higher number of tripeptide units (e.g., 6-7 tripeptide units) to a strain with a YAP1 gene with low number of tripeptide units may result in increased stress tolerance, growth, and/or productivity. Stress tolerance may include increased resistance towards alcohols (e.g., ethanol, butanol, isobutanol) and/or oxidative stress. For example, expressing YAP1 from PNY827 which has six tripeptide units in JA291 which has four tripeptide units may improve tolerance and/or productivity in fermentative production of alcohols (e.g., ethanol, butanol, isobutanol) or other fermentative products. In addition, increasing the number of tripeptide units (e.g., 8-12 tripeptide units) may further increase the stress tolerance of the host strains. Single or multiple mutations of residues in this repeat sequence region may be generated by site-directed mutagenesis or error-prone PCR to produce a diverse library of YAP1 mutant genes. Strains with improved stress tolerance may be selected by screening or selection using methods known by those skilled in the art. Some lineages of yeast fermentation strains (e.g., JA291) may have evolved additional mechanisms for robustness, tolerance, and/or productivity. Combining a more active YAP1 mutant with the intrinsic stress tolerance mechanism of these strains may provide yeast strains with improved productivity, and these improved yeast strains may be used in industrial fermentative processes.

[0094] With renewed interest in sustainable biofuels as an alternative energy source and the desire for the development of efficient and environmentally-friendly production methods, alcohol production using fermentation processes is a viable option to the current chemical synthesis processes. However, some microorganisms that produce alcohol (e.g., ethanol, butanol) in certain yields also have low alcohol toxicity thresholds. Thus, the development of fermentation processes for the commercial production of alcohols has been limited by alcohol toxicity. As described above, alcohol toxicity can produce a stress response in the microorganism leading to, for example, an inhibition of cell growth and decreased cell viability.

[0095] The present invention is directed to microorganisms with improved cell viability, improved productivity, and/or increased stress tolerance (e.g., tolerance to alcohol). In some embodiments, microorganisms may be engineered to exhibit improved cell viability, improved productivity, and/or increased stress tolerance through application of one or more modifications that alter expression and/or activity of one or more components of a stress response pathway. In some embodiments, the stress response pathway is the oxidative stress response pathway. In some embodiments, the one or more components of the stress response pathway may be a yeast activator protein (Yap). In some embodiments, the yeast activator protein may be Yap1. In some embodiments, the yeast activator protein may be Yap2. In some embodiments, the yeast activator protein may be Yap3. In some embodiments, the yeast activator protein may be Yap4. In some embodiments, the yeast activator protein may be Yap5. In some embodiments, the yeast activator protein may be Yap6. In some embodiments, the yeast activator protein may be Yap7. In some embodiments, the yeast activator protein may be Yap8. In some embodiments, the one or more components of the stress response pathway may be Ybp1. In some embodiments, the one or more components of the stress response pathway may be Trx2. In some embodiments, the one or more components of the stress response pathway may be Gsh1. In some embodiments, the one or more components of the stress response pathway may be Gsh2. In some embodiments, the one or more components of the stress response pathway may be Trr1. In some embodiments, the one or more components of the stress response pathway may be Gpx2. In some embodiments, the one or more components of the stress response pathway may be Tsa1. In some embodiments, the one or more components of the stress response pathway may be Ahp1. In some embodiments, the one or more components of the stress response pathway may be Glr1.

[0096] In some embodiments, the one or more modifications that alter expression and/or activity may be an increase in the expression of one or more genes encoding one or more components of the stress response pathway. In some embodiments, the one or more modifications that alter expression and/or activity may be an overexpression of one or more genes encoding one or more components of the stress response pathway. In some embodiments, the one or more modifications that alter expression and/or activity may be an increase in the expression of one or more genes encoding one or more components of the oxidative stress response pathway. In some embodiments, the one or more modifications that alter expression and/or activity may be an overexpression of one or more genes encoding one or more components of the oxidative stress response pathway.

[0097] In some embodiments, the one or more modifications that alter expression and/or activity may be an elimination or reduction in the expression of one or more genes encoding one or more components of the stress response pathway. In some embodiments, the one or more modifications that alter expression and/or activity may be a deletion of one or more genes, or a portion thereof, encoding one or more components of the stress response pathway. In some embodiments, the one or more modifications that alter expression and/or activity may be a mutation, insertion, and/or substitution in one or more genes encoding one or more components of the stress response pathway. In some embodiments, the one or more modifications that alter expression and/or activity may be an elimination or reduction in the expression of one or more genes encoding one or more components of the oxidative stress response pathway. In some embodiments, the one or more modifications that alter expression and/or activity may be a deletion of one or more genes, or a portion thereof, encoding one or more components of the oxidative stress response pathway. In some embodiments, the one or more modifications that alter expression and/or activity may be a mutation, insertion, and/or substitution in one or more genes encoding one or more components of the oxidative stress response pathway.

[0098] In some embodiments, the modification that alters expression and/or activity may be an increase in the expression of one or more genes encoding a yeast activator protein. In some embodiments, the modification that alters expression and/or activity may be an elimination or reduction in the expression of one or more genes encoding a yeast activator protein. In some embodiments, the modification that alters expression and/or activity may be a deletion of one or more genes, or a portion thereof, encoding a yeast activator protein. In some embodiments, the modification that alters expression and/or activity may be a mutation, insertion, and/or substitution in one or more genes encoding a yeast activator protein. In some embodiments, the modification that alters expression and/or activity may be an increase in the expression of one or more genes encoding Yap1, Yap2, Yap3, Yap4, Yap5, Yap6, Yap7, and/or Yap8. In some embodiments, the modification that alters expression and/or activity may be an elimination or reduction in the expression of one or more genes encoding Yap1, Yap2, Yap3, Yap4, Yap5, Yap6, Yap7, and/or Yap8. In some embodiments, the modification that alters expression and/or activity may be a deletion of one or more genes, or a portion thereof, encoding Yap1, Yap2, Yap3, Yap4, Yap5, Yap6, Yap7, and/or Yap8. In some embodiments, the modification that alters expression and/or activity may be a mutation, insertion, and/or substitution in one or more genes encoding Yap1, Yap2, Yap3, Yap4, Yap5, Yap6, Yap7, and/or Yap8.

[0099] In some embodiments, the modification that alters expression and/or activity may be an increase in the expression of one or more genes encoding Ybp1, Trx2, Gsh1, Gsh2, Trr1, Gpx2, Tsa1, Ahp1, and/or Glr1. In some embodiments, the modification that alters expression and/or activity may be an elimination or reduction in the expression of one or more genes encoding Ybp1, Trx2, Gsh1, Gsh2, Trr1, Gpx2, Tsa1, Ahp1, and/or Glr1. In some embodiments, the modification that alters expression and/or activity may be a deletion of one or more genes, or a portion thereof, encoding Ybp1, Trx2, Gsh1, Gsh2, Trr1, Gpx2, Tsa1, Ahp1, and/or Glr1. In some embodiments, the modification that alters expression and/or activity may be a mutation, insertion, and/or substitution in one or more genes encoding Ybp1, Trx2, Gsh1, Gsh2, Trr1, Gpx2, Tsa1, Ahp1, and/or Glr1. In some embodiments, the modification that alters expression and/or activity may be an increase in the expression of one or more genes encoding Yap1, Yap2, Yap3, Yap4, Yap5, Yap6, Yap7, Yap8, Ybp1, Trx2, Gsh1, Gsh2, Trr1, Gpx2, Tsa1, Ahp1, and/or Glr1. In some embodiments, the modification that alters expression and/or activity may be an elimination or reduction in the expression of one or more genes encoding Yap1, Yap2, Yap3, Yap4, Yap5, Yap6, Yap7, Yap8, Ybp1, Trx2, Gsh1, Gsh2, Trr1, Gpx2, Tsa1, Ahp1, and/or Glr1. In some embodiments, the modification that alters expression and/or activity may be a deletion of one or more genes, or portion thereof, encoding Yap1, Yap2, Yap3, Yap4, Yap5, Yap6, Yap7, Yap8, Ybp1, Trx2, Gsh1, Gsh2, Trr1, Gpx2, Tsa1, Ahp1, and/or Glr1. In some embodiments, the modification that alters expression and/or activity may be a mutation, insertion, and/or substitution in one or more genes encoding Yap1, Yap2, Yap3, Yap4, Yap5, Yap6, Yap7, Yap8, Ybp1, Trx2, Gsh1, Gsh2, Trr1, Gpx2, Tsa1, Ahp1, and/or Glr1.

[0100] In some embodiments, a microorganism may comprise one or more modifications that alter expression and/or activity of one or more components of the stress response pathway. In some embodiments, a microorganism may comprise one or more modifications that alter expression and/or activity of one or more components of the oxidative stress response pathway. In some embodiments, a microorganism may comprise one or more modifications that alter expression and/or activity of one or more yeast activator proteins. In some embodiments, a microorganism may comprise one or more modifications that alter expression and/or activity of Yap1, Yap2, Yap3, Yap4, Yap5, Yap6, Yap7, and/or Yap8. In some embodiments, a microorganism may comprise one or more modifications that alter expression and/or activity of Ybp1, Trx2, Gsh1, Gsh2, Trr1, Gpx2, Tsa1, Ahp1, and/or Glr1. In some embodiments, a microorganism may comprise one or more modifications that alter expression and/or activity of Yap1, Yap2, Yap3, Yap4, Yap5, Yap6, Yap7, Yap8, Ybp1, Trx2, Gsh1, Gsh2, Trr1, Gpx2, Tsa1, Ahp1, and/or Glr1.

[0101] In some embodiments, a microorganism may comprise one or more modifications that increase the expression of one or more genes encoding one or more components of a stress response pathway. In some embodiments, a microorganism may comprise one or more modifications that eliminate or reduce the expression of one or more genes encoding one or more components of a stress response pathway. In some embodiments, the stress response pathway may be an oxidative stress response pathway. In some embodiments, a microorganism may comprise one or more modifications that increase the expression of a gene encoding a yeast activator protein. In some embodiments, a microorganism may comprise one or more modifications that eliminate or reduce the expression of a gene encoding a yeast activator protein. In some embodiments, a microorganism may comprise one or more modifications that increase the expression of one or more genes encoding Yap1, Yap2, Yap3, Yap4, Yap5, Yap6, Yap7, and/or Yap8. In some embodiments, a microorganism may comprise one or more modifications that eliminate or reduce the expression of one or more genes encoding Yap1, Yap2, Yap3, Yap4, Yap5, Yap6, Yap7, and/or Yap8. In some embodiments, the one or more modifications may be a deletion of one or more genes described herein, or a portion thereof, a mutation, insertion, and/or substitution in the one or more genes described herein.

[0102] In some embodiments, a microorganism may comprise one or more modifications that increase the activity of a yeast activator protein. In some embodiments, a microorganism may comprise one or more modifications that increase the activity of Yap1, Yap2, Yap3, Yap4, Yap5, Yap6, Yap7, and/or Yap8. In some embodiments, a microorganism may comprise one or more modifications that eliminate or reduce the activity of a yeast activator protein. In some embodiments, a microorganism may comprise one or more modifications that eliminate or reduce the activity of Yap1, Yap2, Yap3, Yap4, Yap5, Yap6, Yap7, and/or Yap8.

[0103] In some embodiments, a microorganism may comprise one or more modifications that increase the expression of one or more genes encoding Ybp1, Trx2, Gsh1, Gsh2, Trr1, Gpx2, Tsa1, Ahp1, and/or Glr1. In some embodiments, a microorganism may comprise one or more modifications that eliminate or reduce the expression of one or more genes encoding Ybp1, Trx2, Gsh1, Gsh2, Trr1, Gpx2, Tsa1, Ahp1, and/or Glr1. In some embodiments, a microorganism may comprise one or more modifications that increase the expression of one or more genes encoding Yap1, Yap2, Yap3, Yap4, Yap5, Yap6, Yap7, Yap8, Ybp1, Trx2, Gsh1, Gsh2, Trr1, Gpx2, Tsa1, Ahp1, and/or Glr1. In some embodiments, a microorganism may comprise one or more modifications that eliminate or reduce the expression of one or more genes encoding Yap1, Yap2, Yap3, Yap4, Yap5, Yap6, Yap7, Yap8, Ybp1, Trx2, Gsh1, Gsh2, Trr1, Gpx2, Tsa1, Ahp1, and/or Glr1. In some embodiments, the one or more modifications may be a deletion of one or more genes described herein, or a portion thereof, a mutation, insertion, and/or substitution in the one or more genes described herein.

[0104] In some embodiments, a microorganism may comprise one or more modifications that increase the activity of Ybp1, Trx2, Gsh1, Gsh2, Trr1, Gpx2, Tsa1, Ahp1, and/or Glr1. In some embodiments, a microorganism may comprise one or more modifications that eliminate or reduce the activity of Ybp1, Trx2, Gsh1, Gsh2, Trr1, Gpx2, Tsa1, Ahp1, and/or Glr1. In some embodiments, a microorganism may comprise one or more modifications that increase the activity of Yap1, Yap2, Yap3, Yap4, Yap5, Yap6, Yap7, Yap8, Ybp1, Trx2, Gsh1, Gsh2, Trr1, Gpx2, Tsa1, Ahp1, and/or Glr1. In some embodiments, a microorganism may comprise one or more modifications that eliminate or reduce the activity of Yap1, Yap2, Yap3, Yap4, Yap5, Yap6, Yap7, Yap8, Ybp1, Trx2, Gsh1, Gsh2, Trr1, Gpx2, Tsa1, Ahp1, and/or Glr1.

[0105] In some embodiments, a microorganism may comprise one or more modifications that alter expression and/or activity of one or more components of a stress response pathway and a butanol biosynthetic pathway. In some embodiments, the stress response pathway is a oxidative stress response pathway. In some embodiments, a microorganism may comprise one or more modifications that alter expression and/or activity of one or more yeast activator proteins and a butanol biosynthetic pathway. In some embodiments, a microorganism may comprise one or more modifications that alter expression and/or activity of Yap1, Yap2, Yap3, Yap4, Yap5, Yap6, Yap7, and/or Yap8, and a butanol biosynthetic pathway. In some embodiments, a microorganism may comprise one or more modifications that alter expression and/or activity of Yap1, Yap2, Yap3, Yap4, Yap5, Yap6, Yap7, Yap8, Ybp1, Trx2, Gsh1, Gsh2, Trr1, Gpx2, Tsa1, Ahp1, and/or Glr1, and a butanol biosynthetic pathway. In some embodiments, the butanol biosynthetic pathway may be a 1-butanol biosynthetic pathway, 2-butanol biosynthetic pathway, 2-butanone biosynthetic pathway, or isobutanol biosynthetic pathway.

[0106] In some embodiments, a microorganism may comprise one or more modifications that increase the expression of one or more genes encoding one or more components of a stress response pathway and a butanol biosynthetic pathway. In some embodiments, the stress response pathway is a oxidative stress response pathway. In some embodiments, a microorganism may comprise one or more modifications that increase the expression of a gene encoding a yeast activator protein and a butanol biosynthetic pathway. In some embodiments, a microorganism may comprise one or more modifications that increase the expression of one or more genes encoding Yap1, Yap2, Yap3, Yap4, Yap5, Yap6, Yap7, and/or Yap8, and a butanol biosynthetic pathway. In some embodiments, a microorganism may comprise one or more modifications that increase the expression of one or more genes encoding Yap1, Yap2, Yap3, Yap4, Yap5, Yap6, Yap7, Yap8, Ybp1, Trx2, Gsh1, Gsh2, Trr1, Gpx2, Tsa1, Ahp1, and/or Glr1, and a butanol biosynthetic pathway. In some embodiments, the one or more modifications may be a deletion of one or more genes described herein, or a portion thereof, a mutation, insertion, and/or substitution in the one or more genes described herein. In some embodiments, the butanol biosynthetic pathway may be a 1-butanol biosynthetic pathway, 2-butanol biosynthetic pathway, 2-butanone biosynthetic pathway, or isobutanol biosynthetic pathway.

[0107] In some embodiments, a microorganism may comprise one or more modifications that increase the activity of a yeast activator protein and a butanol biosynthetic pathway. In some embodiments, a microorganism may comprise one or more modifications that increase the activity of Yap1, Yap2, Yap3, Yap4, Yap5, Yap6, Yap7, and/or Yap8, and a butanol biosynthetic pathway. In some embodiments, a microorganism may comprise one or more modifications that increase the activity of Yap1, Yap2, Yap3, Yap4, Yap5, Yap6, Yap7, Yap8, Ybp1, Trx2, Gsh1, Gsh2, Trr1, Gpx2, Tsa1, Ahp1, and/or Glr1, and a butanol biosynthetic pathway. In some embodiments, the butanol biosynthetic pathway may be a 1-butanol biosynthetic pathway, 2-butanol biosynthetic pathway, 2-butanone biosynthetic pathway, or isobutanol biosynthetic pathway.

[0108] In some embodiments, a microorganism may comprise one or more modifications that eliminate or reduce the expression of one or more genes encoding one or more components of a stress response pathway and a butanol biosynthetic pathway. In some embodiments, the stress response pathway is a oxidative stress response pathway. In some embodiments, a microorganism may comprise one or more modifications that eliminate or reduce the expression of a gene encoding a yeast activator protein and a butanol biosynthetic pathway. In some embodiments, a microorganism may comprise one or more modifications that eliminate or reduce the expression of one or more genes encoding Yap1, Yap2, Yap3, Yap4, Yap5, Yap6, Yap7, and/or Yap8, and a butanol biosynthetic pathway. In some embodiments, a microorganism may comprise one or more modifications that eliminate or reduce the expression of one or more genes encoding Yap1, Yap2, Yap3, Yap4, Yap5, Yap6, Yap7, Yap8, Ybp1, Trx2, Gsh1, Gsh2, Trr1, Gpx2, Tsa1, Ahp1, and/or Glr1, and a butanol biosynthetic pathway. In some embodiments, the butanol biosynthetic pathway may be a 1-butanol biosynthetic pathway, 2-butanol biosynthetic pathway, 2-butanone biosynthetic pathway, or isobutanol biosynthetic pathway.

[0109] In some embodiments, a microorganism may comprise one or more modifications that eliminate or reduce the activity of a yeast activator protein and a butanol biosynthetic pathway. In some embodiments, a microorganism may comprise one or more modifications that eliminate or reduce the activity of Yap1, Yap2, Yap3, Yap4, Yap5, Yap6, Yap7, and/or Yap8, and a butanol biosynthetic pathway. In some embodiments, a microorganism may comprise one or more modifications that eliminate or reduce the activity of Yap1, Yap2, Yap3, Yap4, Yap5, Yap6, Yap7, Yap8, Ybp1, Trx2, Gsh1, Gsh2, Trr1, Gpx2, Tsa1, Ahp1, and/or Glr1, and a butanol biosynthetic pathway. In some embodiments, the one or more modifications may be a deletion of one or more genes described herein, or a portion thereof, a mutation, insertion, and/or substitution in the one or more genes described herein. In some embodiments, the butanol biosynthetic pathway may be a 1-butanol biosynthetic pathway, 2-butanol biosynthetic pathway, 2-butanone biosynthetic pathway, or isobutanol biosynthetic pathway.

[0110] The present invention is directed to compositions comprising a microorganism provided herein. For example, in some embodiments, a composition may comprise a microorganism comprising one or more modifications that alter expression and/or activity of one or more components of a stress response pathway. In some embodiments, the stress response pathway is a oxidative stress response pathway. In some embodiments, a composition may comprise a microorganism comprising one or more modifications that alter expression and/or activity of one or more yeast activator proteins. In some embodiments, a composition may comprise a microorganism comprising one or more modifications that alter expression and/or activity of Yap1, Yap2, Yap3, Yap4, Yap5, Yap6, Yap7, and/or Yap8. In some embodiments, a composition may comprise a microorganism comprising one or more modifications that alter expression and/or activity of Yap1, Yap2, Yap3, Yap4, Yap5, Yap6, Yap7, Yap8, Ybp1, Trx2, Gsh1, Gsh2, Trr1, Gpx2, Tsa1, Ahp1, and/or Glr1.

[0111] In some embodiments, a composition may comprise a microorganism comprising one or more modifications that alter expression and/or activity of one or more components of a stress response pathway and a butanol biosynthetic pathway. In some embodiments, the stress response pathway is a oxidative stress response pathway. In some embodiments, a composition may comprise a microorganism comprising one or more modifications that alter expression and/or activity of one or more yeast activator proteins and a butanol biosynthetic pathway. In some embodiments, a composition may comprise a microorganism comprising one or more modifications that alter expression and/or activity of Yap1, Yap2, Yap3, Yap4, Yap5, Yap6, Yap7, and/or Yap8, and a butanol biosynthetic pathway. In some embodiments, a composition may comprise a microorganism comprising one or more modifications that alter expression and/or activity of Yap1, Yap2, Yap3, Yap4, Yap5, Yap6, Yap7, Yap8, Ybp1, Trx2, Gsh1, Gsh2, Trr1, Gpx2, Tsa1, Ahp1, and/or Glr1, and a butanol biosynthetic pathway. In some embodiments, the butanol biosynthetic pathway may be a 1-butanol biosynthetic pathway, 2-butanol biosynthetic pathway, 2-butanone biosynthetic pathway, or isobutanol biosynthetic pathway.

[0112] In some embodiments, the microorganism exhibits increased alcohol production as compared to the parent cell. In some embodiments, alcohol production may be determined by measuring, for example: broth titer (grams alcohol produced per liter broth), alcohol yield (grams alcohol produced per gram substrate consumed), volumetric productivity (grams alcohol produced per liter per hour), specific productivity (grams alcohol produced per gram recombinant cell biomass per hour), or combinations thereof.

[0113] The present invention is also directed to methods of improving and/or maintaining cell growth and cell viability of a microorganism in a fermentation. In some embodiments, the method comprises obtaining a microorganism (e.g., parent cell) and introducing one or more modifications that alter expression and/or activity of one or more components of a stress response pathway. In some embodiments, the method comprises obtaining a microorganism and introducing one or more modifications that increase the expression of one or more genes encoding one or more components of a stress response pathway. In some embodiments, the method comprises obtaining a microorganism and introducing one or more modifications that eliminate or reduce the expression of one or more genes encoding one or more components of a stress response pathway. In some embodiments, the method comprises obtaining a microorganism and introducing one or more modifications that increase the expression of one or more genes encoding a yeast activator protein. In some embodiments, the method comprises obtaining a microorganism and introducing one or more modifications that eliminate or reduce the expression of one or more genes encoding a yeast activator protein. In some embodiments, the method comprises obtaining a microorganism and introducing one or more modifications that increase the expression of one or more genes encoding Yap1, Yap2, Yap3, Yap4, Yap5, Yap6, Yap7, and/or Yap8. In some embodiments, the method comprises obtaining a microorganism and introducing one or more modifications that eliminate or reduce the expression of one or more genes encoding Yap1, Yap2, Yap3, Yap4, Yap5, Yap6, Yap7, and/or Yap8. In some embodiments, the method comprises obtaining a microorganism and introducing one or more modifications that increase the expression of one or more genes encoding Yap1, Yap2, Yap3, Yap4, Yap5, Yap6, Yap7, Yap8, Ybp1, Trx2, Gsh1, Gsh2, Trr1, Gpx2, Tsa1, Ahp1, and/or Glr1. In some embodiments, the method comprises obtaining a microorganism and introducing one or more modifications that eliminate or reduce the expression of one or more genes encoding Yap1, Yap2, Yap3, Yap4, Yap5, Yap6, Yap7, Yap8, Ybp1, Trx2, Gsh1, Gsh2, Trr1, Gpx2, Tsa1, Ahp1, and/or Glr1. In some embodiments, the one or more modifications may be a deletion of one or more genes described herein, or a portion thereof, a mutation, insertion, and/or substitution in the one or more genes described herein.

[0114] In some embodiments, the method comprises obtaining a microorganism and introducing one or more modifications that increase the activity of a yeast activator protein. In some embodiments, the method comprises obtaining a microorganism and introducing one or more modifications that eliminate or reduce the activity of a yeast activator protein. In some embodiments, the method comprises obtaining a microorganism and introducing one or more modifications that increase the activity of Yap1, Yap2, Yap3, Yap4, Yap5, Yap6, Yap7, and/or Yap8. In some embodiments, the method comprises obtaining a microorganism and introducing one or more modifications that eliminate or reduce the activity of Yap1, Yap2, Yap3, Yap4, Yap5, Yap6, Yap7, and/or Yap8. In some embodiments, the method comprises obtaining a microorganism and introducing one or more modifications that increase the activity of Yap1, Yap2, Yap3, Yap4, Yap5, Yap6, Yap7, Yap8, Ybp1, Trx2, Gsh1, Gsh2, Trr1, Gpx2, Tsa1, Ahp1, and/or Glr1. In some embodiments, the method comprises obtaining a microorganism and introducing one or more modifications that eliminate or reduce the activity of Yap1, Yap2, Yap3, Yap4, Yap5, Yap6, Yap7, Yap8, Ybp1, Trx2, Gsh1, Gsh2, Trr1, Gpx2, Tsa1, Ahp1, and/or Glr1.

[0115] In some embodiments, the one or more genes encoding one or more components of the stress response pathway may be one or more endogenous genes. In some embodiments, the one or more genes encoding one or more components of the oxidative stress response pathway may be one or more endogenous genes. In some embodiments, the gene encoding one or more yeast activator proteins may be an endogenous gene. In some embodiments, the genes encoding Yap1, Yap2, Yap3, Yap4, Yap5, Yap6, Yap7, Yap8, Ybp1, Trx2, Gsh1, Gsh2, Trr1, Gpx2, Tsa1, Ahp1, and/or Glr1 may be endogenous genes. In some embodiments, the one or more genes encoding one or more components of a butanol biosynthetic pathway may be endogenous genes.

[0116] The present invention is also directed to methods of producing an alcohol by a fermentation process. In some embodiments, the method comprises cultivating a microorganism provided herein under conditions whereby the alcohol is produced and recovering the alcohol. In some embodiments, the alcohol may be butanol. In some embodiments, the alcohol may be 1-butanol, 2-butanol, 2-butanone, isobutanol, or tert-butanol.

[0117] In some embodiments, the method comprises (a) providing a microorganism as described herein, (b) contacting the microorganism with one or more carbon substrates under conditions whereby an alcohol is produced; and (c) recovering the alcohol. In some embodiments, contacting with the carbon substrate may occur in the presence of an extractant.

[0118] Unless defined otherwise, all technical and scientific terms used herein have the same meaning as commonly understood by one of ordinary skill in the art to which this invention belongs. In case of conflict, the present application including the definitions will control. Also, unless otherwise required by context, singular terms shall include pluralities and plural terms shall include the singular. All publications, patents and other references mentioned herein are incorporated by reference in their entireties for all purposes.

[0119] In order to further define this invention, the following terms and definitions are herein provided.

[0120] As used herein, the terms “comprises,” “comprising,” “includes,” “including,” “has,” “having,” “contains,” or “containing,” or any other variation thereof, will be understood to imply the inclusion of a stated integer or group of integers but not the exclusion of any other integer or group of integers. For example, a composition, a mixture, a process, a method, an article, or an apparatus that comprises a list of elements is not necessarily limited to only those elements but may include other elements not expressly listed or inherent to such composition, mixture, process, method, article, or apparatus. Further, unless expressly stated to the contrary, “or” refers to an inclusive or and not to an exclusive or. For example, a condition A or B is satisfied by any one of the following: A is true (or present) and B is false (or not present), A is false (or not present) and B is true (or present), and both A and B are true (or present).

[0121] As used herein, the term “consists of,” or variations such as “consist of” or “consisting of,” as used throughout the specification and claims, indicate the inclusion of any recited integer or group of integers, but that no additional integer or group of integers may be added to the specified method, structure, or composition.

[0122] As used herein, the term “consists essentially of,” or variations such as “consist essentially of,” or “consisting essentially of,” as used throughout the specification and claims, indicate the inclusion of any recited integer or group of integers, and the optional inclusion of any recited integer or group of integers that do not materially change the basic or novel properties of the specified method, structure, or composition. See M.P.E.P. §2111.03.

[0123] Also, the indefinite articles “a” and “an” preceding an element or component of the invention are intended to be nonrestrictive regarding the number of instances, i.e., occurrences of the element or component. Therefore, “a” or “an” should be read to include one or at least one, and the singular word form of the element or component also includes the plural unless the number is obviously meant to be singular.

[0124] The term “invention” or “present invention” as used herein is a non-limiting term and is not intended to refer to any single embodiment of the particular invention but encompasses all possible embodiments as described in the application.

[0125] As used herein, the term “about” modifying the quantity of an ingredient or reactant of the invention employed refers to variation in the numerical quantity that can occur, for example, through typical measuring and liquid handling procedures used for making concentrates or solutions in the real world; through inadvertent error in these procedures; through differences in the manufacture, source, or purity of the ingredients employed to make the compositions or to carry out the methods; and the like. The term “about” also encompasses amounts that differ due to different equilibrium conditions for a composition resulting from a particular initial mixture. Whether or not modified by the term “about,” the claims include equivalents to the quantities. In one embodiment, the term “about” means within 10% of the reported numerical value, preferably within 5% of the reported numerical value.

[0126] In some instances, “biomass” as used herein refers to the cell biomass of the fermentation product-producing microorganism, typically provided in units g/L dry cell weight (dcw).

[0127] The term “fermentation product” includes any desired product of interest, including lower alkyl alcohols including, but not limited to butanol, lactic acid, 3-hydroxy-propionic acid, acrylic acid, acetic acid, succinic acid, citric acid, fumaric acid, malic acid, itaconic acid, 1,3-propane-diol, ethylene, glycerol, isobutyrate, etc.

[0128] The term “alcohol” refers to any alcohol that can be produced by a microorganism in a fermentation process. Alcohol includes any straight-chain or branched, saturated or unsaturated, alcohol molecule with 1-10 carbon atoms. For example, alcohol includes methanol, ethanol, propanol, butanol, pentanol, and hexanol.

[0129] The term “butanol” refers to 1-butanol, 2-butanol, 2-butanone, isobutanol, tert-butanol, or mixtures thereof. Isobutanol is also known as 2-methyl-1-propanol.

[0130] The term “butanol biosynthetic pathway” as used herein refers to an enzyme pathway to produce 1-butanol, 2-butanol, 2-butanon, or isobutanol. For example, isobutanol biosynthetic pathways are disclosed in U.S. Patent Application Publication No. 2007/0092957, the entire contents of which are herein incorporated by reference.

[0131] The term “isobutanol biosynthetic pathway” refers to the enzymatic pathway to produce isobutanol. From time to time “isobutanol biosynthetic pathway” is used synonymously with “isobutanol production pathway.”

[0132] The term “2-butanone biosynthetic pathway” as used herein refers to an enzyme pathway to produce 2-butanone.

[0133] The term “extractant” as used herein refers to one or more organic solvents which may be used to extract a fermentation product such as an alcohol from a fermentation broth.

[0134] A “recombinant host cell” is defined as a host cell that has been genetically manipulated to express a biosynthetic production pathway, wherein the host cell either produces a biosynthetic product in greater quantities relative to an unmodified host cell or produces a biosynthetic product that is not ordinarily produced by an unmodified host cell. The term “recombinant host cell” and “recombinant microbial host cell” may be used interchangeably.

[0135] The term “fermentable carbon substrate” refers to a carbon source capable of being metabolized by the microorganisms (or recombinant host cells) such as those disclosed herein. Suitable fermentable carbon substrates include, but are not limited to, monosaccharides such as glucose or fructose; disaccharides such as lactose or sucrose; oligosaccharides; polysaccharides such as starch; cellulose, lignocellulose, or hemicellulose; one-carbon substrates; fatty acids; and combinations thereof.

[0136] “Fermentation medium” as used herein means a mixture of water, fermentable carbon substrates (e.g., sugars), dissolved solids, optionally microorganisms producing fermentation products, optionally fermentation products, and all other constituents of the material held in the fermentation vessel in which the fermentation product is being made by the reaction of fermentable carbon substrates to fermentation products, water, and carbon dioxide (CO₂) by the microorganisms present. From time to time as used herein, the term “fermentation broth” and “fermentation mixture” may be used synonymously with “fermentation medium.”

[0137] The term “aerobic conditions” as used herein means growth conditions in the presence of oxygen.

[0138] The term “microaerobic conditions” as used herein means growth conditions with low levels of dissolved oxygen. For example, the oxygen level may be less than about 1% of air-saturation.

[0139] The term “anaerobic conditions” as used herein means growth conditions in the absence of oxygen.

[0140] The term “carbon substrate” refers to a carbon source capable of being metabolized by the microorganisms (or recombinant host cells) disclosed herein. Non-limiting examples of carbon substrates are provided herein and include, but are not limited to, monosaccharides, oligosaccharides, polysaccharides, ethanol, lactate, succinate, glycerol, carbon dioxide, methanol, glucose, fructose, sucrose, xylose, arabinose, dextrose, and mixtures thereof.

[0141] As used herein, the term “yield” refers to the amount of product per amount of carbon source in g/g. The yield may be exemplified for glucose as the carbon source. It is understood unless otherwise noted that yield is expressed as a percentage of the theoretical yield. In reference to a microorganism or metabolic pathway, “theoretical yield” is defined as the maximum amount of product that can be generated per total amount of substrate as dictated by the stoichiometry of the metabolic pathway used to make the product. It is understood that while in the present disclosure the yield is exemplified for glucose as a carbon source, the invention can be applied to other carbon sources and the yield may vary depending on the carbon source used. One skilled in the art can calculate yields on various carbon sources.

[0142] The term “effective titer” as used herein, refers to the total amount of fermentation product (e.g., alcohol) produced by fermentation per liter of fermentation medium. For example, the total amount of fermentation product (e.g., alcohol) may include: (i) the amount of fermentation product (e.g., alcohol) in the fermentation medium; (ii) the amount of fermentation product (e.g., alcohol) recovered from the organic extractant; and (iii) the amount of fermentation product (e.g., alcohol) recovered from the gas phase, if gas stripping is used.

[0143] The term “effective rate” as used herein, refers to the total amount of fermentation product (e.g., alcohol) produced by fermentation per liter of fermentation medium per hour of fermentation.

[0144] The term “effective yield” as used herein, refers to the amount of fermentation product (e.g., alcohol) produced per unit of fermentable carbon substrate consumed by the microorganism (or recombinant host cell) described herein.

[0145] The term “specific productivity” as used herein, refers to the grams (g) of fermentation product (e.g., alcohol) produced per gram (g) of dry cell weight of cells per unit time.

[0146] The terms “derivative” and “analog” refer to a polypeptide differing from the enzymes of the invention, but retaining essential properties thereof. The term “derivative” may also refer to host cells differing from the host cells of the invention, but retaining essential properties thereof. Generally, derivatives and analogs are overall closely similar, and, in many regions, identical to the polypeptides of the invention. The terms “derived-from,” “derivative,” and “analog” when referring to polypeptides of the invention include any polypeptides which retain at least some of the activity of the corresponding native polypeptide (e.g., the activity of its catalytic domain of an enzyme).

[0147] Derivatives of polypeptides disclosed herein are polypeptides which may have been altered so as to exhibit features not found on the native polypeptide. Derivatives can be covalently modified by substitution (e.g., amino acid substitution), chemical, enzymatic, or other appropriate means with a moiety other than a naturally occurring amino acid (e.g., a detectable moiety such as an enzyme or radioisotope). Examples of derivatives include fusion proteins, or proteins which are based on a naturally occurring protein sequence, but which have been altered. For example, proteins can be designed by knowledge of a particular amino acid sequence, and/or a particular secondary, tertiary, and/or quaternary structure. Derivatives include proteins that are modified based on the knowledge of a previous sequence, natural or synthetic, which is then optionally modified, often, but not necessarily to confer some improved function. These sequences or proteins, are then said to be derived from a particular protein or amino acid sequence. In some embodiments of the invention, a derivative may retain at least about 50% identity, at least about 60% identity, at least about 70% identity, at least about 80% identity, at least about 90% identity, at least about 95% identity, at least about 97% identity, or at least about 99% identity to the sequence the derivative is derived-from. In some embodiments of the invention, a polypeptide is said to be derived-from a polypeptide naturally found in a particular species if, using molecular genetic techniques, the DNA sequence for part or all of the polypeptide is amplified and placed into a new host cell.

### Polypeptides and Polynucleotides for Use in the Invention

[0148] As used herein, the term “polypeptide” is intended to encompass a singular polypeptide as well as plural polypeptides, and refers to a molecule composed of monomers (amino acids) linearly linked by amide bonds (also known as peptide bonds). The term “polypeptide” refers to any chain or chains of two or more amino acids, and does not refer to a specific length of the product. Thus, peptides, dipeptides, tripeptides, oligopeptides, protein, amino acid chain, or any other term used to refer to a chain or chains of two or more amino acids, are included within the definition of polypeptide, and the term “polypeptide” may be used instead of, or interchangeably with any of these terms. A polypeptide may be derived from a natural biological source or produced by recombinant technology, but is not necessarily translated from a designated nucleic acid sequence. It may be generated in any manner, including by chemical synthesis. The polypeptides used in this invention comprise full-length polypeptides and fragments thereof.

[0149] As used herein, “increased activity” or “increased expression” refers to any measurable increase in a known biological activity or expression of a polypeptide when compared to the same biological activity or expression of the polypeptide prior to the change resulting in the increased activity or expression. Such a change can include a modification of a polypeptide or a polynucleotide encoding a polypeptide as described herein. Increased activity or expression of a polypeptide disclosed herein can be determined by methods well known in the art and disclosed herein.

[0150] As used herein, “reduced activity” or “reduced expression” refers to any measurable decrease in a known biological activity or expression of a polypeptide when compared to the same biological activity or expression of the polypeptide prior to the change resulting in the reduced activity or expression. Such a change can include a modification of a polypeptide or a polynucleotide encoding a polypeptide as described herein. A reduced activity or expression of a polypeptide disclosed herein can be determined by methods well known in the art and disclosed herein.

[0151] As used herein, “eliminated activity” or “eliminated expression” refers to the abolishment of a known biological activity or expression of a polypeptide when compared to the same biological activity or expression of the polypeptide prior to the change resulting in the eliminated activity or expression. Such a change can include a modification of a polypeptide or a polynucleotide encoding a polypeptide as described herein. An eliminated activity or expression includes a biological activity or expression of a polypeptide that is not measurable when compared to the same biological activity or expression of the polypeptide prior to the change resulting in the eliminated activity or expression. An eliminated activity or expression of a polypeptide disclosed herein can be determined by methods well known in the art and disclosed herein.

[0152] By an “isolated” polypeptide or a fragment, variant, or derivative thereof is intended a polypeptide that is not in its natural milieu. No particular level of purification is required. For example, an isolated polypeptide can be removed from its native or natural environment. Recombinantly produced polypeptides and proteins expressed in host cells are considered isolated for the purposes of the invention, as are native or recombinant polypeptides which have been separated, fractionated, or partially or substantially purified by any suitable technique.

[0153] A polypeptide of the invention may be of a size of about 10 or more, about 20 or more, about 25 or more, about 50 or more, about 75 or more, about 100 or more, about 200 or more, about 500 or more, about 1,000 or more, or about 2,000 or more amino acids. Polypeptides may have a defined three-dimensional structure, although they do not necessarily have such structure. Polypeptides with a defined three-dimensional structure are referred to as folded, and polypeptides which do not possess a defined three-dimensional structure, but rather can adopt a large number of different conformations, and are referred to as unfolded.

[0154] Also included as polypeptides of the present invention are derivatives, analogs, or variants of the foregoing polypeptides, and any combination thereof. The terms “active variant,” “active fragment,” “active derivative,” and “analog” refer to polypeptides of the present invention. Variants of polypeptides of the present invention include polypeptides with altered amino acid sequences due to amino acid substitutions, deletions, and/or insertions. Variants may occur naturally or be non-naturally occurring. Non-naturally occurring variants may be produced using known mutagenesis techniques. Variant polypeptides may comprise conservative or non-conservative amino acid substitutions, deletions, and/or insertions. Derivatives of polypeptides of the present invention, are polypeptides which have been altered so as to exhibit additional features not found on the native polypeptide. Examples include fusion proteins. Variant polypeptides may also be referred to herein as “polypeptide analogs.” As used herein, a “derivative” of a polypeptide refers to a subject polypeptide having one or more residues chemically derivatized by reaction of a functional side group. Also included as “derivatives” are those polypeptides which contain one or more naturally occurring amino acid derivatives of the twenty standard amino acids. For example, 4-hydroxyproline may be substituted for proline; 5-hydroxylysine may be substituted for lysine; 3-methylhistidine may be substituted for histidine; homoserine may be substituted for serine; and ornithine may be substituted for lysine.

[0155] A “fragment” is a unique portion of a polypeptide used in the invention which is identical in sequence to but shorter in length than the parent full-length sequence. A fragment may comprise up to the entire length of the defined sequence, minus one amino acid residue. For example, a fragment may comprise from about 5 to about 1000 contiguous amino acid residues. A fragment may be at least about 5, about 10, about 15, about 20, about 25, about 30, about 40, about 50, about 60, about 75, about 100, about 150, about 250 or at least about 500 contiguous amino acid residues in length. Fragments may be selected from certain regions of a molecule. For example, a polypeptide fragment may comprise a certain length of contiguous amino acids selected from the first 100 or 200 amino acids of a polypeptide as shown in a certain defined sequence. Clearly these lengths are exemplary, and any length that is supported by the specification, including the Sequence Listing, tables, and figures, may be encompassed by the present embodiments.

[0156] Alternatively, recombinant variants encoding these same or similar polypeptides can be synthesized or selected by making use of the redundancy in the genetic code. Various codon substitutions, such as the silent changes which produce various restriction sites, may be introduced to optimize cloning into a plasmid or viral vector or expression in a host cell system.

[0157] Amino acid substitutions may be the result of replacing one amino acid with another amino acid having similar structural and/or chemical properties (i.e., conservative amino acid replacements), or they can be the result of replacing one amino acid with an amino acid having different structural and/or chemical properties (i.e., non-conservative amino acid replacements). Conservative amino acid substitutions may be made on the basis of similarity in polarity, charge, solubility, hydrophobicity, hydrophilicity, and/or the amphipathic nature of the residues. For example, nonpolar (hydrophobic) amino acids include alanine, leucine, isoleucine, valine, proline, phenylalanine, tryptophan, and methionine; polar neutral amino acids include glycine, serine, threonine, cysteine, tyrosine, asparagine, and glutamine; positively charged (basic) amino acids include arginine, lysine, and histidine; and negatively charged (acidic) amino acids include aspartic acid and glutamic acid. Alternatively, non-conservative amino acid substitutions can be made by selecting the differences in polarity, charge, solubility, hydrophobicity, hydrophilicity, or the amphipathic nature of any of these amino acids. Insertions or deletions may be in the range of about 1 to about 20 amino acids, or about 1 to about 10 amino acids. The variation allowed may be experimentally determined by systematically making insertions, deletions, or substitutions of amino acids in a polypeptide molecule using recombinant DNA techniques and assaying the resulting recombinant variants for activity.

[0158] As used herein, the term “variant” refers to a polypeptide differing from a specifically recited polypeptide of the invention by amino acid insertions, deletions, mutations, and/or substitutions created using, for example, recombinant DNA techniques such as mutagenesis. Guidance in determining which amino acid residues may be replaced, added, or deleted without abolishing activities of interest, may be found by comparing the sequence of the particular polypeptide with that of homologous polypeptides, for example, yeast or bacterial, and minimizing the number of amino acid sequence changes made in regions of high homology (conserved regions) or by replacing amino acids with consensus sequences.

[0159] By a polypeptide having an amino acid or polypeptide sequence at least, for example, 95% identical to a query amino acid sequence of the present invention, it is intended that the amino acid sequence of the subject polypeptide is identical to the query sequence except that the subject polypeptide sequence may include up to five amino acid alterations per each 100 amino acids of the query amino acid sequence. In other words, to obtain a polypeptide having an amino acid sequence at least 95% identical to a query amino acid sequence, up to 5% of the amino acid residues in the subject sequence may be inserted, deleted, and/or substituted with another amino acid. These alterations of the reference sequence may occur at the amino or carboxy terminal positions of the reference amino acid sequence or anywhere between those terminal positions, interspersed either individually among residues in the reference sequence or in one or more contiguous groups within the references sequence.

[0160] As a practical matter, whether any particular polypeptide is at least about 80%, about 85%, about 90%, about 95%, about 96%, about 97%, about 98%, or about 99% identical to a reference polypeptide can be determined conventionally using known computer programs. For example, a method for determining the best overall match between a query sequence (e.g., a sequence of the present invention) and a subject sequence, also referred to as a global sequence alignment, can be determined using the FASTDB computer program based on the algorithm of Brutlag, et al. (Comp. Appl. Biosci. 6:237-245, 1990). In a sequence alignment, the query and subject sequences are either both nucleotide sequences or both amino acid sequences. The result of the global sequence alignment is in percent identity. Parameters that may be used in a FASTDB amino acid alignment are: Matrix=PAM 0, k-tuple=2, Mismatch Penalty=1, Joining Penalty=20, Randomization Group Length=0, Cutoff Score=1, Window Size=sequence length, Gap Penalty=5, Gap Size Penalty-0.05, Window Size=500 or the length of the subject amino acid sequence, whichever is shorter.

[0161] If the subject sequence is shorter than the query sequence due to N- or C-terminal deletions, not because of internal deletions, a manual correction must be made to the results. This is because the FASTDB program does not account for N- and C-terminal truncations of the subject sequence when calculating global percent identity. For subject sequences truncated at the N- and C-termini, relative to the query sequence, the percent identity is corrected by calculating the number of residues of the query sequence that are N- and C-terminal of the subject sequence, which are not matched/aligned with a corresponding subject residue, as a percent of the total bases of the query sequence. Whether a residue is matched/aligned is determined by results of the FASTDB sequence alignment. This percentage is then subtracted from the percent identity, calculated by the above FASTDB program using the specified parameters, to arrive at a final percent identity score. This final percent identity score is what is used for the purposes of the present invention. Only residues to the N- and C-termini of the subject sequence, which are not matched/aligned with the query sequence, are considered for the purposes of manually adjusting the percent identity score. That is, only query residue positions outside the farthest N- and C-terminal residues of the subject sequence.

[0162] For example, a 90 amino acid residue subject sequence is aligned with a 100 residue query sequence to determine percent identity. The deletion occurs at the N-terminus of the subject sequence and therefore, the FASTDB alignment does not show a matching/alignment of the first 10 residues at the N-terminus. The 10 unpaired residues represent 10% of the sequence (number of residues at the N- and C-termini not matched/total number of residues in the query sequence) so 10% is subtracted from the percent identity score calculated by the FASTDB program. If the remaining 90 residues were perfectly matched the final percent identity would be 90%. In another example, a 90 residue subject sequence is compared with a 100 residue query sequence. This time the deletions are internal deletions so there are no residues at the N- or C-termini of the subject sequence which are not matched/aligned with the query. In this case, the percent identity calculated by FASTDB is not manually corrected. Once again, only residue positions outside the N- and C-terminal ends of the subject sequence, as displayed in the FASTDB alignment, which are not matched/aligned with the query sequence are manually corrected for. No other manual corrections are to be made for the purposes of the present invention.

[0163] Polypeptides suitable for use in the present invention and fragments thereof are encoded by polynucleotides. The term “polynucleotide” is intended to encompass a singular nucleic acid as well as plural nucleic acids, and refers to an isolated nucleic acid molecule or construct, for example, messenger RNA (mRNA), virally-derived RNA, or plasmid DNA (pDNA). A polynucleotide may comprise a conventional phosphodiester bond or a non-conventional bond (e.g., an amide bond, such as found in peptide nucleic acids (PNA)). A polynucleotide may contain the nucleotide sequence of the full-length cDNA sequence, or a fragment thereof, including the untranslated 5′ and 3′ sequences and the coding sequences. The polynucleotide may be composed of any polyribonucleotide or polydeoxyribonucleotide, which may be unmodified RNA or DNA or modified RNA or DNA. For example, polynucleotides may be composed of single- and double-stranded DNA, DNA that is a mixture of single- and double-stranded regions, single- and double-stranded RNA, and RNA that is mixture of single- and double-stranded regions, hybrid molecules comprising DNA and RNA that may be single-stranded or, more typically, double-stranded or a mixture of single- and double-stranded regions. Polynucleotide embraces chemically, enzymatically, or metabolically modified forms.

[0164] The term “nucleic acid” refers to any one or more nucleic acid segments, for example, DNA or RNA fragments, present in a polynucleotide. Polynucleotides according to the present invention further include such molecules produced synthetically. Polynucleotides of the invention may be native to the host cell or heterologous. In addition, a polynucleotide or a nucleic acid may be or may include a regulatory element such as a promoter, ribosome binding site, or a transcription terminator.

[0165] In some embodiments, the polynucleotide or nucleic acid is DNA. In the case of DNA, a polynucleotide comprising a nucleic acid, which encodes a polypeptide normally may include a promoter and/or other transcription or translation control elements operably associated with one or more coding regions. An operable association is when a coding region for a gene product, for example, a polypeptide, is associated with one or more regulatory sequences in such a way as to place expression of the gene product under the influence or control of the regulatory sequence(s). Two DNA fragments (such as a polypeptide coding region and a promoter associated therewith) are operably associated if induction of promoter function results in the transcription of mRNA encoding the desired gene product and if the nature of the linkage between the two DNA fragments does not interfere with the ability of the expression regulatory sequences to direct the expression of the gene product or interfere with the ability of the DNA template to be transcribed. Thus, a promoter region would be operably associated with a nucleic acid encoding a polypeptide if the promoter was capable of effecting transcription of that nucleic acid. Other transcription control elements, besides a promoter, for example enhancers, operators, repressors, and transcription termination signals, may be operably associated with the polynucleotide. Suitable promoters and other transcription control regions are disclosed herein.

[0166] A polynucleotide sequence may be referred to as isolated, in which it has been removed from its native environment. For example, a heterologous polynucleotide encoding a polypeptide or polypeptide fragment having enzymatic activity (e.g., the ability to convert a substrate to xylulose) contained in a vector is considered isolated for the purposes of the present invention. Further examples of an isolated polynucleotide include recombinant polynucleotides maintained in heterologous host cells or purified (partially or substantially) polynucleotides in solution. Isolated polynucleotides or nucleic acids according to the present invention further include such molecules produced synthetically. An isolated polynucleotide fragment in the form of a polymer of DNA may be comprised of one or more segments of cDNA, genomic DNA, or synthetic DNA.

[0167] The term “gene” refers to a nucleic acid fragment that is capable of being expressed as a specific protein, optionally including regulatory sequences preceding (5′ non-coding sequences) and following (3′ non-coding sequences) the coding sequence. In some instances, the term “gene” and “polynucleotide” may be used interchangeably.

[0168] As used herein, a “coding region” or “ORF” is a portion of nucleic acid which consists of codons translated into amino acids. Although a stop codon (e.g., TAG, TGA, or TAA) is not translated into an amino acid, it may be considered to be part of a coding region, if present, but any flanking sequences, for example, promoters, ribosome binding sites, transcriptional terminators, introns, 5′ and 3′ non-translated regions, and the like, are not part of a coding region. Suitable regulatory sequences refer to nucleotide sequences located upstream (5′ non-coding sequences), within, or downstream (3′ non-coding sequences) of a coding sequence that influence the transcription, RNA processing or stability, or translation of the associated coding sequence. Regulatory sequences may include promoters, translation leader sequences, introns, polyadenylation recognition sequences, RNA processing sites, effector binding sites, and stem-loop structures.

[0169] A variety of translation control elements are known to those of ordinary skill in the art. These include, but are not limited to, ribosome binding sites, translation initiation and termination codons, and elements derived from viral systems (particularly an internal ribosome entry site, or IRES). In some embodiments, a polynucleotide of the present invention is RNA, for example, in the form of messenger RNA (mRNA). RNA of the present invention may be single-stranded or double-stranded.

[0170] Polynucleotide and nucleic acid coding regions of the present invention may be associated with additional coding regions which encode secretory or signal peptides, which direct the secretion of a polypeptide encoded by a polynucleotide of the present invention.

[0171] As used herein, the term “transformation” refers to the transfer of a nucleic acid fragment into the genome of a host organism, resulting in genetically stable inheritance. Host organisms containing the transformed nucleic acid fragments are referred to as recombinant or transformed organisms.

[0172] The term “expression,” as used herein, refers to the transcription and stable accumulation of sense (mRNA) or antisense RNA derived from the nucleic acid fragment of the invention. Expression may also refer to translation of mRNA into a polypeptide.

[0173] The term “overexpression,” as used herein, refers to an increase in the level of nucleic acid or protein in a host cell. Thus, overexpression can result from increasing the level of transcription or translation of an endogenous sequence in a host cell or can result from the introduction of a heterologous sequence into a host cell. Overexpression can also result from increasing the stability of a nucleic acid or protein sequence.

[0174] The terms “plasmid,” “vector,” and “cassette” refer to an extra chromosomal element often carrying genes which are not part of the central metabolism of the cell, and usually in the form of circular double-stranded DNA fragments. Such elements may be autonomously replicating sequences, genome integrating sequences, phage or nucleotide sequences, linear or circular, of a single- or double-stranded DNA or RNA, derived from any source, in which a number of nucleotide sequences have been joined or recombined into a unique construction which is capable of introducing a promoter fragment and DNA sequence for a selected gene product along with appropriate 3′ untranslated sequence into a cell. Transformation cassette refers to a specific vector containing a foreign gene and having elements in addition to the foreign gene that facilitates transformation of a particular host cell. Expression cassette refers to a specific vector containing a foreign gene and having elements in addition to the foreign gene that allow for enhanced expression of that gene in a foreign host.

[0175] The term “artificial” refers to a synthetic, or non-host cell derived composition, for example, a chemically-synthesized oligonucleotide.

[0176] As used herein, “native” refers to the form of a polynucleotide, gene, or polypeptide as found in nature with its own regulatory sequences, if present.

[0177] The term “endogenous,” when used in reference to a polynucleotide, a gene, or a polypeptide refers to a native polynucleotide or gene in its natural location in the genome of an organism, or for a native polypeptide, is transcribed and translated from this location in the genome.

[0178] The term “heterologous” when used in reference to a polynucleotide, a gene, or a polypeptide refers to a polynucleotide, gene, or polypeptide not normally found in the host organism. Heterologous polynucleotide includes a native coding region, or portion thereof, that is reintroduced into the source organism in a form that is different from the corresponding native polynucleotide. Heterologous gene includes a native coding region, or portion thereof, that is reintroduced into the source organism in a form that is different from the corresponding native gene, for example, not in its natural location in the organism's genome. For example, a heterologous gene may include a native coding region that is a portion of a chimeric gene including non-native regulatory regions that is reintroduced into the native host. A transgene is a gene that has been introduced into the genome by a transformation procedure. Heterologous polypeptide includes a native polypeptide that is reintroduced into the source organism in a form that is different from the corresponding native polypeptide. The heterologous polynucleotide or gene may be introduced into the host organism by, for example, gene transfer.

[0179] As used herein, the term “modification” refers to a change in a polynucleotide disclosed herein that results in altered activity of a polypeptide encoded by the polynucleotide, as well as a change in a polypeptide disclosed herein that results in altered activity of the polypeptide. Such changes may be made by methods well known in the art, including, but not limited to, deleting, mutating (e.g., spontaneous mutagenesis, random mutagenesis, mutagenesis caused by mutator genes, or transposon mutagenesis), substituting, inserting, overexpressing, altering the cellular location, altering the state of the polynucleotide or polypeptide (e.g., methylation, phosphorylation or ubiquitination), removing a cofactor, chemical modification, covalent modification, irradiation with UV or X-rays, homologous recombination, mitotic recombination, promoter replacement methods, and/or combinations thereof. Guidance in determining which nucleotides or amino acid residues can be modified, may be found by comparing the sequence of the particular polynucleotide or polypeptide with that of homologous polynucleotides or polypeptides, for example, yeast or bacterial, and maximizing the number of modifications made in regions of high homology (conserved regions) or consensus sequences.

[0180] As used herein, the term “variant” refers to a polynucleotide differing from a specifically recited polynucleotide of the invention by nucleotide insertions, deletions, mutations, and substitutions, created using, for example, recombinant DNA techniques, such as mutagenesis. Recombinant polynucleotide variants encoding same or similar polypeptides may be synthesized or selected by making use of the redundancy in the genetic code. Various codon substitutions, such as silent changes which produce various restriction sites, may be introduced to optimize cloning into a plasmid or viral vector for expression. Mutations in the polynucleotide sequence may be reflected in the polypeptide or domains of other peptides added to the polypeptide to modify the properties of any part of the polypeptide.

[0181] The term “recombinant genetic expression element” refers to a nucleic acid fragment that expresses one or more specific proteins, including regulatory sequences preceding (5′ non-coding sequences) and following (3′ termination sequences) coding sequences for the proteins. A chimeric gene is a recombinant genetic expression element. The coding regions of an operon may form a recombinant genetic expression element, along with an operably linked promoter and termination region.

[0182] “Regulatory sequences” refers to nucleotide sequences located upstream (5′ non-coding sequences), within, or downstream (3′ non-coding sequences) of a coding sequence, and which influence the transcription, RNA processing or stability, or translation of the associated coding sequence. Regulatory sequences may include promoters, enhancers, operators, repressors, transcription termination signals, translation leader sequences, introns, polyadenylation recognition sequences, RNA processing site, effector binding site, and stem-loop structure.

[0183] The term “promoter” refers to a nucleic acid sequence capable of controlling the expression of a coding sequence or functional RNA. In general, a coding sequence is located 3′ to a promoter sequence. Promoters may be derived in their entirety from a native gene, or be composed of different elements derived from different promoters found in nature, or even comprise synthetic nucleic acid segments. It is understood by those skilled in the art that different promoters may direct the expression of a gene in different tissues or cell types, or at different stages of development, or in response to different environmental or physiological conditions. Promoters which cause a gene to be expressed in most cell types at most times are commonly referred to as constitutive promoters. Inducible promoters, on the other hand, cause a gene to be expressed when the promoter is induced or turned on by a promoter-specific signal or molecule. It is further recognized that since in most cases the exact boundaries of regulatory sequences have not been completely defined, DNA fragments of different lengths may have identical promoter activity. For example, it will be understood that FBA1 promoter may be used to refer to a fragment derived from the promoter region of the FBA1 gene.

[0184] The term “terminator” as used herein refers to DNA sequences located downstream of a coding sequence. This includes polyadenylation recognition sequences and other sequences encoding regulatory signals capable of affecting mRNA processing or gene expression. The polyadenylation signal is usually characterized by affecting the addition of polyadenylic acid tracts to the 3′ end of the mRNA precursor. The 3′ region can influence the transcription, RNA processing or stability, or translation of the associated coding sequence. It is recognized that since in most cases the exact boundaries of regulatory sequences have not been completely defined, DNA fragments of different lengths may have identical terminator activity. For example, it will be understood that “CYC1 terminator” may be used to refer to a fragment derived from the terminator region of the CYC1 gene.

[0185] The term “operably linked” refers to the association of nucleic acid sequences on a single nucleic acid fragment so that the function of one is affected by the other. For example, a promoter is operably linked with a coding sequence when it is capable of effecting the expression of that coding sequence (i.e., that the coding sequence is under the transcriptional control of the promoter). Coding sequences can be operably linked to regulatory sequences in sense or antisense orientation.

[0186] As used herein, the term “transformation” refers to the transfer of a nucleic acid fragment into the genome of a host microorganism, resulting in genetically stable inheritance. Host microorganisms containing the transformed nucleic acid fragments are referred to as “transgenic,” “recombinant,” or “transformed” microorganisms.

[0187] The term “codon-optimized,” as it refers to genes or coding regions of nucleic acid molecules for transformation of various hosts, refers to the alteration of codons in the gene or coding regions of the nucleic acid molecules to reflect the typical codon usage of the host organism without altering the polypeptide encoded by the DNA. Such optimization includes replacing at least one, more than one, or a significant number of codons with one or more codons that are more frequently used in the genes of that organism.

[0188] Deviations in the nucleotide sequence that comprise the codons encoding the amino acids of any polypeptide chain allow for variations in the sequence coding for the gene. Since each codon consists of three nucleotides, and the nucleotides comprising DNA are restricted to four specific bases, there are 64 possible combinations of nucleotides, 61 of which encode amino acids (the remaining three codons encode signals ending translation). The genetic code which shows which codons encode which amino acids is reproduced herein as Table 2. As a result, many amino acids are designated by more than one codon. For example, the amino acids alanine and proline are coded for by four triplets, serine and arginine by six, whereas tryptophan and methionine are coded by just one triplet. This degeneracy allows for DNA base composition to vary over a wide range without altering the amino acid sequence of the proteins encoded by the DNA.

TABLE 2
The Standard Genetic Code

| | T | C | A | G |
|---|---|---|---|---|
| T | TTT Phe (F) | TCT Ser (S) | TAT Tyr (Y) | TGT Cys (C) |
| | TTC ″ | TCC ″ | TAC ″ | TGC |
| | TTA Leu (L) | TCA ″ | TAA Ter | TGA Ter |
| | TTG ″ | TCG ″ | TAG Ter | TGG Trp (W) |
| C | CTT Leu (L) | CCT Pro (P) | CAT His (H) | CGT Arg (R) |
| | CTC ″ | CCC ″ | CAC ″ | CGC ″ |
| | CTA ″ | CCA ″ | CAA Gln (Q) | CGA ″ |
| | CTG ″ | CCG ″ | CAG ″ | CGG ″ |
| A | ATT Ile (I) | ACT Thr (T) | AAT Asn (N) | AGT Ser (S) |
| | ATC ″ | ACC ″ | AAC ″ | AGC ″ |
| | ATA ″ | ACA ″ | AAA Lys (K) | AGA Arg (R) |
| | ATG Met (M) | ACG ″ | AAG ″ | AGG ″ |
| G | GTT Val (V) | GCT Ala (A) | GAT Asp (D) | GGT Gly (G) |
| | GTC ″ | GCC ″ | GAC ″ | GGC ″ |
| | GTA ″ | GCA ″ | GAA Glu (E) | GGA ″ |
| | GTG ″ | GCG ″ | GAAG ″ | GGG ″ |

[0189] Many organisms display a bias for use of particular codons to code for insertion of a particular amino acid in a growing peptide chain. Codon preference or codon bias, differences in codon usage between organisms, is afforded by degeneracy of the genetic code, and is well documented among many organisms. Codon bias often correlates with the efficiency of translation of messenger RNA (mRNA), which is in turn believed to be dependent on, inter alia, the properties of the codons being translated and the availability of particular transfer RNA (tRNA) molecules. The predominance of selected tRNAs in a cell is generally a reflection of the codons used most frequently in peptide synthesis. Accordingly, genes may be tailored for optimal gene expression in a given organism based on codon optimization.

[0190] Given the large number of gene sequences available for a wide variety of animal, plant, and microbial species, it is possible to calculate the relative frequencies of codon usage. Codon usage tables are readily available, for example, at the “Codon Usage Database” available at http://www.kazusa.or.jp/codon/ (visited Mar. 20, 2008), and these tables may be adapted in a number of ways (see, e.g., Nakamura, et al., Nucl. Acids Res. 28:292, 2000). Codon usage tables for yeast, calculated from GenBank Release 128.0 [15 Feb. 2002], are reproduced below as Table 3. This table uses mRNA nomenclature, and so instead of thymine (T) which is found in DNA, the table uses uracil (U) which is found in RNA. The table has been adapted so that frequencies are calculated for each amino acid, rather than for all 64 codons.

TABLE 3
Codon Usage Table for Saccharomyces cerevisiae Genes

| | | | Frequency per |
|---|---|---|---|
| Amino Acid | Codon | Number | thousand |
| Phe | UUU | 170666 | 26.1 |
| Phe | UUC | 120510 | 18.4 |
| Leu | UUA | 170884 | 26.2 |
| Leu | UUG | 177573 | 27.2 |
| Leu | CUU | 80076 | 12.3 |
| Leu | CUC | 35545 | 5.4 |
| Leu | CUA | 87619 | 13.4 |
| Leu | CUG | 68494 | 10.5 |
| Ile | AUU | 196893 | 30.1 |
| Ile | AUC | 112176 | 17.2 |
| Ile | AUA | 116254 | 17.8 |
| Met | AUG | 136805 | 20.9 |
| Val | GUU | 144243 | 22.1 |
| Val | GUC | 76947 | 11.8 |
| Val | GUA | 76927 | 11.8 |
| Val | GUG | 70337 | 10.8 |
| Ser | UCU | 153557 | 23.5 |
| Ser | UCC | 92923 | 14.2 |
| Ser | UCA | 122028 | 18.7 |
| Ser | UCG | 55951 | 8.6 |
| Ser | AGU | 92466 | 14.2 |
| Ser | AGC | 63726 | 9.8 |
| Pro | CCU | 88263 | 13.5 |
| Pro | CCC | 44309 | 6.8 |
| Pro | CCA | 119641 | 18.3 |
| Pro | CCG | 34597 | 5.3 |
| Thr | ACU | 132522 | 20.3 |
| Thr | ACC | 83207 | 12.7 |
| Thr | ACA | 116084 | 17.8 |
| Thr | ACG | 52045 | 8.0 |
| Ala | GCU | 138358 | 21.2 |
| Ala | GCC | 82357 | 12.6 |
| Ala | GCA | 105910 | 16.2 |
| Ala | GCG | 40358 | 6.2 |
| Tyr | UAU | 122728 | 18.8 |
| Tyr | UAC | 96596 | 14.8 |
| His | CAU | 89007 | 13.6 |
| His | CAC | 50785 | 7.8 |
| Gln | CAA | 178251 | 27.3 |
| Gln | CAG | 79121 | 12.1 |
| Asn | AAU | 233124 | 35.7 |
| Asn | AAC | 162199 | 24.8 |
| Lys | AAA | 273618 | 41.9 |
| Lys | AAG | 201361 | 30.8 |
| Asp | GAU | 245641 | 37.6 |
| Asp | GAC | 132048 | 20.2 |
| Glu | GAA | 297944 | 45.6 |
| Glu | GAG | 125717 | 19.2 |
| Cys | UGU | 52903 | 8.1 |
| Cys | UGC | 31095 | 4.8 |
| Trp | UGG | 67789 | 10.4 |
| Arg | CGU | 41791 | 6.4 |
| Arg | CGC | 16993 | 2.6 |
| Arg | CGA | 19562 | 3.0 |
| Arg | CGG | 11351 | 1.7 |
| Arg | AGA | 139081 | 21.3 |
| Arg | AGG | 60289 | 9.2 |
| Gly | GGU | 156109 | 23.9 |
| Gly | GGC | 63903 | 9.8 |
| Gly | GGA | 71216 | 10.9 |
| Gly | GGG | 39359 | 6.0 |
| Stop | UAA | 6913 | 1.1 |
| Stop | UAG | 3312 | 0.5 |
| Stop | UGA | 4447 | 0.7 |

[0191] By utilizing this or similar tables, one of ordinary skill in the art may apply the frequencies to any given polypeptide sequence, and produce a nucleic acid fragment of a codon-optimized coding region which encodes the polypeptide, but which uses codons optimal for a given species.

[0192] Randomly assigning codons at an optimized frequency to encode a given polypeptide sequence may be done manually by calculating codon frequencies for each amino acid, and then assigning the codons to the polypeptide sequence randomly. Additionally, various algorithms and computer software programs are readily available to those of ordinary skill in the art, for example, the EditSeq function in the Lasergene Package, available from DNAstar, Inc., Madison, Wis., the backtranslation function in the VectorNTI Suite, available from InforMax, Inc., Bethesda, Md., and the backtranslate function in the GCG-Wisconsin Package, available from Accelrys, Inc., San Diego, Calif. In addition, various resources are publicly available to codon-optimize coding region sequences, for example, the backtranslation function at http://www.entelechon.com/bioinformatics/backtranslation.php?lang=eng (visited Apr. 15, 2008) and the backtranseq function available at http://bioinfo.pbi.nrc.ca:8090/EMBOSS/index.html (visited Jul. 9, 2002). Constructing a rudimentary algorithm to assign codons based on a given frequency can also easily be accomplished with basic mathematical functions by one of ordinary skill in the art. Codon-optimized coding regions may be designed by various methods known to those skilled in the art including software packages such as Synthetic Gene Designer (http://phenotype.biosci.umbc.edu/codon/sgd/index.php).

[0193] A polynucleotide or nucleic acid fragment is hybridizable to another nucleic acid fragment, such as a cDNA, genomic DNA, or RNA molecule, when a single-stranded form of the nucleic acid fragment can anneal to the other nucleic acid fragment under the appropriate conditions of temperature and solution ionic strength. Hybridization and washing conditions are well known and exemplified in Sambrook, J., Fritsch, E. F. and Maniatis, T. Molecular Cloning: A Laboratory Manual, 2^{nd} ed., Cold Spring Harbor Laboratory: Cold Spring Harbor, N.Y. (1989), particularly Chapter 11 and Table 11.1 therein. The conditions of temperature and ionic strength determine the stringency of the hybridization. Stringency conditions may be adjusted to screen for moderately similar fragments (such as homologous sequences from distantly related organisms), to highly similar fragments (such as genes that duplicate functional enzymes from closely related organisms). Post-hybridization washes determine stringency conditions. One set of preferred conditions uses a series of washes starting with 6×SSC, 0.5% SDS at room temperature for 15 min, then repeated with 2×SSC, 0.5% SDS at 45° C. for 30 min, and then repeated twice with 0.2×SSC, 0.5% SDS at 50° C. for 30 min. A more preferred set of stringent conditions uses higher temperatures in which the washes are identical to those above except for the temperature of the final two 30 min washes in 0.2×SSC, 0.5% SDS was increased to 60° C. Another preferred set of highly stringent conditions uses two final washes in 0.1×SSC, 0.1% SDS at 65° C. An additional set of stringent conditions include hybridization at 0.1×SSC, 0.1% SDS, 65° C. and washes with 2×SSC, 0.1% SDS followed by 0.1×SSC, 0.1% SDS.

[0194] Hybridization requires that the two nucleic acids contain complementary sequences, although depending on the stringency of the hybridization, mismatches between bases are possible. The appropriate stringency for hybridizing nucleic acids depends on the length of the nucleic acids and the degree of complementation, variables well known in the art. The greater the degree of similarity or homology between two nucleotide sequences, the greater the value of Tm for hybrids of nucleic acids having those sequences. The relative stability (corresponding to higher Tm) of nucleic acid hybridizations decreases in the following order: RNA:RNA, DNA:RNA, DNA:DNA. For hybrids of greater than 100 nucleotides in length, equations for calculating Tm have been derived (see, e.g., Sambrook, et al., supra, 9.50-9.51). For hybridizations with shorter nucleic acids (e.g., oligonucleotides), the position of mismatches becomes more important, and the length of the oligonucleotide determines its specificity (see, e.g., Sambrook, et al., supra, 11.7-11.8). In some embodiments, the length for a hybridizable nucleic acid is at least about 10 nucleotides, at least about 15 nucleotides, at least about 20 nucleotides, or at least about 30 nucleotides. Furthermore, the skilled artisan will recognize that the temperature and wash solution salt concentration may be adjusted as necessary according to factors such as length of the probe.

[0195] A “substantial portion” of an amino acid or nucleotide sequence is that portion comprising enough of the amino acid sequence of a polypeptide or the nucleotide sequence of a gene to putatively identify that polypeptide or gene, either by manual evaluation of the sequence by one skilled in the art, or by computer-automated sequence comparison and identification using algorithms such as BLAST (Altschul, et al., J. Mol. Biol. 215:403-410, 1993). In general, a sequence of ten or more contiguous amino acids or thirty or more nucleotides is necessary in order to putatively identify a polypeptide or nucleic acid sequence as homologous to a known protein or gene. Moreover, with respect to nucleotide sequences, gene specific oligonucleotide probes comprising 20-30 contiguous nucleotides may be used in sequence-dependent methods of gene identification (e.g., Southern hybridization) and isolation (e.g., in situ hybridization of bacterial colonies or bacteriophage plaques). In addition, short oligonucleotides of 12-15 bases may be used as amplification primers in PCR in order to obtain a particular nucleic acid fragment comprising the primers. Accordingly, a substantial portion of a nucleotide sequence comprises enough of the sequence to specifically identify and/or isolate a nucleic acid fragment comprising the sequence. The instant specification teaches the complete amino acid and nucleotide sequence encoding particular proteins. The skilled artisan, having the benefit of the sequences as reported herein, may now use all or a substantial portion of the disclosed sequences for purposes known to those skilled in this art. Accordingly, the instant invention comprises the complete sequences as provided herein, as well as substantial portions of those sequences as defined above.

[0196] The term “complementary” is used to describe the relationship between nucleotide bases that are capable of hybridizing to one another. For example, with respect to DNA, adenosine is complementary to thymine and cytosine is complementary to guanine.

[0197] The term “percent identity” as known in the art, is a relationship between two or more polypeptide sequences or two or more polynucleotide sequences, as determined by comparing the sequences. In the art, identity also means the degree of sequence relatedness between polypeptide or polynucleotide sequences, as the case may be, as determined by the match between strings of such sequences. Identity and similarity may be readily calculated by known methods, including but not limited to those disclosed in: 1) Computational Molecular Biology (Lesk, A. M., Ed.) Oxford University: NY (1988); 2) Biocomputing: Informatics and Genome Projects (Smith, D. W., Ed.) Academic: NY (1993); 3) Computer Analysis of Sequence Data, Part I (Griffin, A. M., and Griffin, H. G., Eds.) Humania: NJ (1994); 4) Sequence Analysis in Molecular Biology (von Heinje, G., Ed.) Academic (1987); and 5) Sequence Analysis Primer (Gribskov, M. and Devereux, J., Eds.) Stockton: NY (1991).

[0198] Preferred methods to determine identity are designed to give the best match between the sequences tested. Methods to determine identity and similarity are codified in publicly available computer programs. Sequence alignments and percent identity calculations may be performed using the MegAlign™ program of the LASERGENE bioinformatics computing suite (DNASTAR Inc., Madison, Wis.). Multiple alignment of the sequences may be performed using the Clustal method of alignment which encompasses several varieties of the algorithm including the Clustal V method of alignment corresponding to the alignment method labeled Clustal V (disclosed by Higgins and Sharp, CABIOS. 5:151-153, 1989; Higgins, et al., Comput. Appl. Biosci. 8:189-191, 1992) and found in the MegAlign™ program of the LASERGENE bioinformatics computing suite (DNASTAR Inc.). For multiple alignments, the default values correspond to GAP PENALTY=10 and GAP LENGTH PENALTY=10. Default parameters for pairwise alignments and calculation of percent identity of protein sequences using the Clustal method are KTUPLE=1, GAP PENALTY=3, WINDOW=5 and DIAGONALS SAVED=5. For nucleic acids, these parameters are KTUPLE=2, GAP PENALTY=5, WINDOW=4 and DIAGONALS SAVED=4. After alignment of the sequences using the Clustal V program, it is possible to obtain a percent identity by viewing the sequence distances table in the same program. Additionally the Clustal W method of alignment is available and corresponds to the alignment method labeled Clustal W (described by Higgins and Sharp, CABIOS. 5:151-153, 1989; Higgins, et al., Comput. Appl. Biosci. 8:189-191, 1992) and found in the MegAlign™ v6.1 program of the LASERGENE bioinformatics computing suite (DNASTAR Inc.). Default parameters for multiple alignment (GAP PENALTY=10, GAP LENGTH PENALTY=0.2, Delay Divergen Seqs(%)=30, DNA Transition Weight=0.5, Protein Weight Matrix=Gonnet Series, DNA Weight Matrix=IUB). After alignment of the sequences using the Clustal W program, it is possible to obtain a percent identity by viewing the sequence distances table in the same program.

[0199] The term “sequence analysis software” refers to any computer algorithm or software program that is useful for the analysis of nucleotide or amino acid sequences. Sequence analysis software may be commercially available or independently developed. Typical sequence analysis software includes, but is not limited to: 1) the GCG suite of programs (Wisconsin Package Version 9.0, Genetics Computer Group (GCG), Madison, Wis.); 2) BLASTP, BLASTN, BLASTX (Altschul, et al., J. Mol. Biol. 215:403-410, 1990); 3) DNASTAR (DNASTAR, Inc., Madison, Wis.); 4) Sequencher (Gene Codes Corporation, Ann Arbor, Mich.); and 5) the FASTA program incorporating the Smith-Waterman algorithm (W. R. Pearson, Comput. Methods Genome Res., [Proc. Int. Symp.] 1994, Meeting Date 1992, 111-20, Editor(s): Suhai, Sandor. Plenum: New York, N.Y.). Within the context of this application, it will be understood that where sequence analysis software is used for analysis, that the results of the analysis may be based on the default values of the program referenced, unless otherwise specified. As used herein “default values” mean any set of values or parameters that originally load with the software when first initialized.

[0200] By a nucleic acid or polynucleotide having a nucleotide sequence at least, for example, 95% identical to a reference nucleotide sequence of the present invention, it is intended that the nucleotide sequence of the polynucleotide is identical to the reference sequence except that the polynucleotide sequence may include up to five point mutations per each 100 nucleotides of the reference nucleotide sequence. In other words, to obtain a polynucleotide having a nucleotide sequence at least 95% identical to a reference nucleotide sequence, up to 5% of the nucleotides in the reference sequence may be deleted or substituted with another nucleotide, or a number of nucleotides up to 5% of the total nucleotides in the reference sequence may be inserted into the reference sequence.

[0201] As a practical matter, whether any particular nucleic acid molecule or polypeptide is at least 80%, 85%, 90%, 95%, 96%, 97%, 98%, or 99% identical to a nucleotide sequence or polypeptide sequence of the present invention may be determined conventionally using known computer programs. A preferred method for determining the best overall match between a query sequence (a sequence of the present invention) and a subject sequence, also referred to as a global sequence alignment, can be determined using the FASTDB computer program based on the algorithm of Brutlag, et al. (Comp. Appl. Biosci. 6:237-245, 1990). In a sequence alignment, the query and subject sequences are both DNA sequences. An RNA sequence may be compared by converting U's to T's. The result of the global sequence alignment is percent identity. Preferred parameters used in a FASTDB alignment of DNA sequences to calculate percent identity are: Matrix=Unitary, k-tuple=4, Mismatch Penalty=1, Joining Penalty-30, Randomization Group Length=0, Cutoff Score=1, Gap Penalty=5, Gap Size Penalty=0.05, Window Size=500 or the length of the subject nucleotide sequences, whichever is shorter.

[0202] If the subject sequence is shorter than the query sequence because of 5′ or 3′ deletions, not because of internal deletions, a manual correction must be made to the results. This is because the FASTDB program does not account for 5′ and 3′ truncations of the subject sequence when calculating percent identity. For subject sequences truncated at the 5′ or 3′ ends, relative to the query sequence, the percent identity is corrected by calculating the number of bases of the query sequence that are 5′ and 3′ of the subject sequence, which are not matched/aligned, as a percent of the total bases of the query sequence. Whether a nucleotide is matched/aligned is determined by results of the FASTDB sequence alignment. This percentage is then subtracted from the percent identity, calculated by the above FASTDB program using the specified parameters, to arrive at a final percent identity score. This corrected score is what is used for the purposes of the present invention. Only bases outside the 5′ and 3′ bases of the subject sequence, as displayed by the FASTDB alignment, which are not matched/aligned with the query sequence, are calculated for the purposes of manually adjusting the percent identity score.

[0203] For example, a 90 base subject sequence is aligned to a 100 base query sequence to determine percent identity. The deletions occur at the 5′ end of the subject sequence and therefore, the FASTDB alignment does not show a matched/alignment of the first 10 bases at 5′ end. The 10 unpaired bases represent 10% of the sequence (number of bases at the 5′ and 3′ ends not matched/total number of bases in the query sequence) so 10% is subtracted from the percent identity score calculated by the FASTDB program. If the remaining 90 bases were perfectly matched the final percent identity would be 90%. In another example, a 90 base subject sequence is compared with a 100 base query sequence. This time the deletions are internal deletions so that there are no bases on the 5′ or 3′ of the subject sequence which are not matched/aligned with the query. In this case, the percent identity calculated by FASTDB is not manually corrected. Once again, only bases 5′ and 3′ of the subject sequence which are not matched/aligned with the query sequence are manually corrected. No other manual corrections are to be made for the purposes of the present invention.

[0204] Standard recombinant DNA and molecular cloning techniques used here are well known in the art and are described by Sambrook, J., Fritsch, E. F. and Maniatis, T., Molecular Cloning: A Laboratory Manual, Second Edition, Cold Spring Harbor Laboratory Press, Cold Spring Harbor, N.Y. (1989); and by Silhavy, T. J., Bennan, M. L. and Enquist, L. W., Experiments with Gene Fusions, Cold Spring Harbor Laboratory Press, Cold Spring Harbor, N.Y. (1984); and by Ausubel, F. M. et al., Current Protocols in Molecular Biology, published by Greene Publishing Assoc. and Wiley-Interscience (1987). Additional methods used here are in Methods in Enzymology, Volume 194, Guide to Yeast Genetics and Molecular and Cell Biology (Part A, 2004, Christine Guthrie and Gerald R. Fink (Eds.), Elsevier Academic Press, San Diego, Calif.).

[0205] Methods for increasing or for reducing gene expression of the target genes described herein are well known to one skilled in the art. Methods for gene expression in yeasts are known in the art as described, for example, in Methods in Enzymology, Volume 194, Guide to Yeast Genetics and Molecular and Cell Biology (Part A, 2004, Christine Guthrie and Gerald R. Fink (Eds.), Elsevier Academic Press, San Diego, Calif.). For example, methods for increasing expression include increasing the number of genes that are integrated in the genome or on plasmids that express the target protein, and using a promoter that is more highly expressed than the natural promoter. Promoters that may be operably linked in a constructed chimeric gene for expression include, for example, constitutive promoters FBA1, TDH3, ADH1, and GPM1, and the inducible promoters GAL1, GAL10, and CUP1. Suitable transcriptional terminators that may be used in a chimeric gene construct for expression include, but are not limited to, FBA1t, TDH3t, GPM1t, ERG10t, GAL1t, CYC1t, and ADH1t.

[0206] Suitable promoters, transcriptional terminators, and coding regions may be cloned into E. coli-yeast shuttle vectors, and transformed into yeast cells. These vectors allow for propagation in both E. coli and yeast strains. Typically, the vector contains a selectable marker and sequences allowing autonomous replication or chromosomal integration in the desired host. Plasmids used in yeast are, for example, shuttle vectors pRS423, pRS424, pRS425, and pRS426 (American Type Culture Collection, Rockville, Md.), which contain an E. coli replication origin (e.g., pMB1), a yeast 2μ origin of replication, and a marker for nutritional selection. The selection markers for these four vectors are HIS3 (vector pRS423), TRP1 (vector pRS424), LEU2 (vector pRS425), and URA3 (vector pRS426). Construction of expression vectors may be performed by either standard molecular cloning techniques in E. coli or by the gap repair recombination method in yeast.

[0207] Methods for reducing expression include using genetic modification of the encoding genes. Many methods for genetic modification of target genes to reduce or eliminate expression are known to one skilled in the art and may be used to create the present production host cells. Modifications that may be used include, but are not limited to, deletion of the entire gene or a portion of the gene encoding the protein, inserting a DNA fragment into the encoding gene (in either the promoter or coding region) so that the protein is not expressed or expressed at lower levels, introducing a mutation into the coding region which adds a stop codon or frame shift such that a functional protein is not expressed, and introducing one or more mutations into the coding region to alter amino acids so that a non-functional or a less active protein is expressed. In addition, expression of a target gene may be blocked by expression of an antisense RNA or an interfering RNA, and constructs may be introduced that result in cosuppression. In addition, the synthesis or stability of the transcript may be lessened by mutation. Similarly, the efficiency by which a protein is translated from mRNA may be modulated by mutation. All of these methods may be readily practiced by one skilled in the art making use of the known or identified sequences encoding target proteins.

[0208] DNA sequences surrounding a target coding sequence are also useful in some modification procedures. In particular, DNA sequences surrounding, for example, a target gene (e.g., yeast activator protein) coding sequence are useful for modification methods using homologous recombination. For example, in this method, target gene flanking sequences are placed bounding a selectable marker gene to mediate homologous recombination whereby the marker gene replaces the target gene. Also, partial target gene sequences and target gene flanking sequences bounding a selectable marker gene may be used to mediate homologous recombination whereby the marker gene replaces a portion of the target gene. In addition, the selectable marker may be bounded by site-specific recombination sites, so that following expression of the corresponding site-specific recombinase, the resistance gene is excised from the target gene without reactivating the latter. The site-specific recombination leaves behind a recombination site which disrupts expression of the target protein. The homologous recombination vector may be constructed to also leave a deletion in the target gene following excision of the selectable marker, as is well known to one skilled in the art.

[0209] Deletions may be made using mitotic recombination as described in Wach, et al. (Yeast 10:1793-1808, 1994). This method involves preparing a DNA fragment that contains a selectable marker between genomic regions that may be as short as 20 bp, and which binds a target DNA sequence. This DNA fragment may be prepared by PCR amplification of the selectable marker gene using as primers (e.g., oligonucleotides) that hybridize to the ends of the marker gene and that include the genomic regions that can recombine with the host cell genome. The linear DNA fragment can be efficiently transformed into the host cell and recombined into the genome resulting in gene replacement including with deletion of the target DNA sequence (as described in Methods in Enzymology, 194:281-301, 1991).

[0210] Moreover, promoter replacement methods may be used to exchange the endogenous transcriptional control elements allowing another means to modulate expression (see, e.g., Mnaimneh, et al., Cell 118:31-44, 2004).

[0211] In addition, target gene encoded activity may be disrupted using random mutagenesis, which is followed by screening to identify strains with reduced activity. Using this type of method, the DNA sequence of the target gene encoding region, or any other region of the genome affecting activity, need not be known. Methods for creating genetic mutations are common and well known in the art and may be applied to the generation of mutants. Commonly used random genetic modification methods (reviewed in Methods in Yeast Genetics, 2005, Cold Spring Harbor Laboratory Press, Cold Spring Harbor, N.Y.) include spontaneous mutagenesis, mutagenesis caused by mutator genes, chemical mutagenesis, irradiation with UV or X-rays, or transposon mutagenesis.

[0212] Chemical mutagenesis of yeast commonly involves treatment of yeast cells with one of the following DNA mutagens: ethyl methanesulfonate (EMS), nitrous acid, diethyl sulfate, or N-methyl-N′-nitro-N-nitroso-guanidine (MNNG). These methods of mutagenesis have been reviewed by Spencer, et al. (Mutagenesis in Yeast, 1996, Yeast Protocols: Methods in Cell and Molecular Biology. Humana Press, Totowa, N.J.). Chemical mutagenesis with EMS may be performed as described in Methods in Yeast Genetics, 2005, Cold Spring Harbor Laboratory Press, Cold Spring Harbor, N.Y. Irradiation with ultraviolet (UV) light or X-rays may also be used to produce random mutagenesis in yeast cells. The primary effect of mutagenesis by UV irradiation is the formation of pyrimidine dimers which disrupt the fidelity of DNA replication. Protocols for UV-mutagenesis of yeast may be found in Spencer, et al. (Mutagenesis in Yeast, 1996, Yeast Protocols: Methods in Cell and Molecular Biology. Humana Press, Totowa, N.J.). Introduction of a mutator phenotype may also be used to generate random chromosomal mutations in yeast. Common mutator phenotypes may be obtained through disruption of one or more of the following genes: PMS1, MAG1, RAD18, or RAD51. Restoration of the non-mutator phenotype may be easily obtained by insertion of the wild-type allele. Collections of modified cells produced from any of these or other known random mutagenesis processes may be screened for increased, reduced, or eliminated target gene encoded activity such as yeast activator protein activity or activity of other components of the oxidative stress pathway.

### Modification of Stress Response Pathways

[0213] In some embodiments of the invention, a recombinant host cell may comprise one or more modifications that alter the expression and/or activity of one or more components of a stress response pathway. For example, the recombinant host cell may comprise one or more modifications that increase the expression and/or activity of one or more components of a stress response pathway. In some embodiments, the components of a stress response pathway may include yeast activator proteins such as Yap1, Yap2, Yap3, Yap4, Yap5, Yap6, Yap7, or Yap8. Examples of yeast activator protein polynucleotides, genes, and polypeptides that may be targeted for modification in a recombinant host cell disclosed herein include, but are not limited to, SEQ ID NO: 2-18. A description of the sequences may be found in Table 4.

TABLE 4

| Nucleotide | | Sequence |
|---|---|---|
| or | | Number |
| Protein | Species/Strain | (SEQ ID NO) |
| YAP1 | Saccharomyces cerevisiae BY4741 | 2 |
| YAP1 | Saccharomyces cerevisiae PNY827 | 3 |
| Yap1 | Saccharomyces cerevisiae PNY827 | 4 |
| YAP1 | Saccharomyces cerevisiae CEN.PK 113-7D | 5 |
| Yap1 | Saccharomyces cerevisiae CEN.PK 113-7D | 6 |
| Yap1 | Saccharomyces cerevisiae AWRI1631 | 7 |
| Yap1 | Saccharomyces cerevisiae Kyokai saki | 8 |
| Yap1 | Saccharomyces cerevisiae Lalvin QA23 | 9 |
| Yap1 | Saccharomyces cerevisiae Vin13 | 10 |
| Yap1 | Saccharomyces cerevisiae S288C | 11 |
| Yap2 | Saccharomyces cerevisiae | 12 |
| Yap3 | Saccharomyces cerevisiae | 13 |
| Yap4 | Saccharomyces cerevisiae | 14 |
| Yap5 | Saccharomyces cerevisiae | 15 |
| Yap6 | Saccharomyces cerevisiae | 16 |
| Yap7 | Saccharomyces cerevisiae | 17 |
| Yap8 | Saccharomyces cerevisiae | 18 |

[0214] In some embodiments, the amino acid sequence of these yeast activator proteins may be modified, for example, by amino acid substitutions. As shown in Example 2, the amino acid sequence of the yeast activator protein Yap1 may be modified by amino acid substitutions at any position including amino acid residues 80, 132, 168, 237, 254, 257, 297, 302, 367, 404, 411, 444, 487, 498, 499, 548, 584, 617, and/or 636. Amino acid substitutions at these positions of the amino acid sequence of Yap1 may be conservative or non-conservative amino acid substitutions. For example, amino acid substitution may include substitution with polar amino acids, nonpolar amino acids, basic amino acids, or acidic amino acids. In some embodiments, the amino acid substitutions include those substitutions in SEQ ID NO: 19-27. A description of the sequences may be found in Table 5.

TABLE 5

| YAP1 | | Sequence Number |
|---|---|---|
| variant | Amino Acid Substitutions | (SEQ ID NO) |
| B5-1 | V254M, A404T | 19 |
| B5-4 | V80A, G132R, C444G | 20 |
| B8-1 | G168D | 21 |
| B8-4 | K487E, N617D | 22 |
| C5-2 | F237L, K297E, I367T, L499F | 23 |
| C5-3 | S411N, G584D, V636I | 24 |
| D8-4 | S257L | 25 |
| E5-4 | L302F, T498M, R548K | 26 |
| F8-1 | L302F, T498M, R548K | 27 |

[0215] In some embodiments, these yeast activator proteins may be overexpressed in a recombinant host cell. For example, the wild-type Yap1 or variants of Yap1 (e.g., SEQ ID NO: 2-27) may be expressed in a recombinant host cell. In some embodiments, the wild-type Yap1 and variants of Yap1 may also be overexpressed in a recombinant host cell.

[0216] In some embodiments, the amino acid sequence of yeast activator proteins may be modified, for example, by amino acid insertions. In some embodiments, the amino acid sequence of a yeast activator protein may be modified by the insertion of one or more peptide repeat units. In some embodiments, the amino acid sequence of a yeast activator protein may be modified by the insertion of one or more tripeptide repeat units. In some embodiments, at least one tripeptide repeat unit, at least two tripeptide repeat units, at least three tripeptide repeat units, at least four tripeptide repeat units, at least five tripeptide repeat units, at least six tripeptide repeat units, at least seven tripeptide repeat units, at least eight tripeptide repeat units, or more tripeptide repeat units may be inserted into the amino acid sequence of a yeast activator protein. For example, the amino acid sequence of Yap1 may be modified by the insertion of one or more tripeptide repeat units such as Ser-Thr-Asp (“STD”) or Ser-Thr-Gly (“STG”).

[0217] In some embodiments, a yeast activator protein comprising one or more tripeptide repeat units may be expressed in a recombinant microorganism. For example, Yap1 of the strain AWRI796 which comprises seven tripeptide units may be expressed in a recombinant host microorganism as described herein. In some embodiments, the Yap1 amino acid sequences include those amino acids sequences disclosed in SEQ ID NO: 4 and 6-11 and the amino acid sequences encoded by nucleotide sequences disclosed in SEQ ID NO: 2, 3, and 19-27.

[0218] In some embodiments of the invention, a recombinant host cell may comprise a modification or disruption of a polynucleotide or gene encoding a polypeptide having yeast activator protein activity or a modification or disruption of a polypeptide having yeast activator protein activity. In some embodiments, the recombinant host cell may comprise a deletion, mutation, insertion, and/or substitution in an endogenous polynucleotide or gene encoding a polypeptide having yeast activator protein activity or in an endogenous polypeptide having yeast activator protein activity. Such modifications, disruptions, deletions, mutations, insertions, and/or substitutions may result in yeast activator protein activity that is reduced or eliminated.

[0219] Other examples of yeast activator protein polynucleotides, genes, and polypeptides that may be targeted for modification or inactivation in a recombinant host cell disclosed herein include, but are not limited to, yeast activator protein polynucleotides, genes, and/or polypeptides having at least about 70% to at least about 75%, at least about 75% to at least about 80%, at least about 80% to at least about 85%, at least about 85% to at least about 90%, at least about 90% to at least about 95%, at least about 96%, at least about 97%, at least about 98%, or at least about 99% sequence identity to SEQ ID NOs: 2-27, wherein such a polynucleotide or gene encodes, or such a polypeptide has, yeast activator protein activity. In some embodiments, the yeast activator protein polynucleotides, genes, and/or polypeptides may have at least about 70%, at least about 75%, at least about 80%, at least about 85%, at least about 90%, at least about 95%, at least about 96%, at least about 97%, at least about 98%, or at least about 99% sequence identity to SEQ ID NOs: 2-27, wherein such a polynucleotide or gene encodes, or such a polypeptide has, yeast activator protein activity. Still other examples of yeast activator protein polynucleotides, genes, and polypeptides that may be targeted for modification or inactivation in a recombinant host cell disclosed herein include, but are not limited to, an active variant, fragment, or derivative of SEQ ID NOs: 2-27, wherein such a polynucleotide or gene encodes, or such a polypeptide has, yeast activator protein activity.

[0220] In some embodiments, the sequences of other yeast activator protein polynucleotides, genes, and/or polypeptides may be identified in the literature and in bioinformatics databases well known to the skilled person using sequences disclosed herein and available in the art. For example, such sequences may be identified through BLAST searching of publicly available databases with known yeast activator protein-encoding polynucleotide or polypeptide sequences. In such a method, identities may be based on the Clustal W method of alignment using the default parameters of GAP PENALTY=10, GAP LENGTH PENALTY=0.1, and Gonnet 250 series of protein weight matrix.

[0221] Additionally, the yeast activator protein polynucleotide or polypeptide sequences disclosed herein or known in the art may be used to identify other yeast activator protein homologs in nature. For example, the yeast activator protein encoding nucleic acid fragments disclosed herein can be used to isolate genes encoding homologous proteins. Isolation of homologous genes using sequence-dependent protocols is well known in the art. Examples of sequence-dependent protocols include, but are not limited to, methods of nucleic acid hybridization; methods of DNA and RNA amplification, as exemplified by various uses of nucleic acid amplification technologies (e.g., polymerase chain reaction (PCR), U.S. Pat. No. 4,683,202; ligase chain reaction (LCR), Tabor, et al., Proc. Acad. Sci. U.S.A. 82:1074, 1985; or strand displacement amplification (SDA), Walker, et al., Proc. Natl. Acad. Sci. U.S.A., 89:392, 1992); and methods of library construction and screening by complementation.

[0222] In some embodiments, yeast activator protein polynucleotides, genes, and/or polypeptides related to a recombinant host cell disclosed herein may be modified, for example, overexpressed or disrupted. Many methods for genetic modification of target genes to increase, reduce, or eliminate expression are known to one of ordinary skill in the art and may be used to create a recombinant host cell disclosed herein. The modification of yeast activator protein in a recombinant host cell disclosed herein may be confirmed using methods known in the art. For example, disruption of a particular yeast activator protein may be confirmed with PCR screening using primers internal and external to the yeast activator protein gene or by Southern blot using a probe designed to the yeast activator protein gene sequence.

[0223] In some embodiments of the invention, a recombinant host cell may comprise one or more modifications that alter the expression and/or activity of one or more components of a stress response pathway. For example, the recombinant host cell may comprise one or more modifications that increase the expression and/or activity of one or more components of a stress response pathway. In some embodiments, the components of the stress response pathway may include Ybp1, Trx2, Gsh1, Gsh2, Trr1, Gpx2, Tsa1, Ahp1, or Glr1. Examples of components of the stress response pathway polynucleotides, genes, and polypeptides that may be targeted for modification in a recombinant host cell disclosed herein include, but are not limited to, SEQ ID NO: 28-38. A description of the sequences may be found in Table 6.

TABLE 6

| Nucleotide or | | Sequence Number |
|---|---|---|
| Protein | Species/Strain | (SEQ ID NO) |
| YBP1 | Saccharomyces cerevisiae PNY827 | 28 |
| Ybp1 | Saccharomyces cerevisiae PNY827 | 29 |
| Ybp1 | Saccharomyces cerevisiae S288C | 30 |
| Trx2 | Saccharomyces cerevisiae | 31 |
| Gsh1 | Saccharomyces cerevisiae | 32 |
| Gsh2 | Saccharomyces cerevisiae | 33 |
| Trr1 | Saccharomyces cerevisiae | 34 |
| Gpx2 | Saccharomyces cerevisiae | 35 |
| Tsa1 | Saccharomyces cerevisiae | 36 |
| Ahp1 | Saccharomyces cerevisiae | 37 |
| Glr1 | Saccharomyces cerevisiae | 38 |

[0224] In some embodiments of the invention, a recombinant host cell may comprise a modification or disruption of a polynucleotide or gene encoding a polypeptide of a stress response pathway or a modification or disruption of a polypeptide of a stress response pathway. In some embodiments, the recombinant host cell may comprise a deletion, mutation, insertion, and/or substitution in an endogenous polynucleotide or gene encoding a polypeptide of a stress response pathway or in an endogenous polypeptide of a stress response pathway. Such modifications, disruptions, deletions, mutations, insertions, and/or substitutions may result in reduced or eliminated activity of the component of a stress response pathway. In some embodiments, the components of the stress response pathway may include Ybp1, Trx2, Gsh1, Gsh2, Trr1, Gpx2, Tsa1, Ahp1, or Glr1. Examples of components of the stress response pathway polynucleotides, genes, and polypeptides that may be targeted for modification in a recombinant host cell disclosed herein include, but are not limited to, SEQ ID NO: 28-38.

[0225] Other examples of polynucleotides, genes, and polypeptides of a stress response pathway that can be targeted for modification or inactivation in a recombinant host cell disclosed herein include, but are not limited to, polynucleotides, genes, and/or polypeptides having at least about 70% to at least about 75%, at least about 75% to at least about 80%, at least about 80% to at least about 85%, at least about 85% to at least about 90%, at least about 90% to at least about 95%, at least about 96%, at least about 97%, at least about 98%, or at least about 99% sequence identity to SEQ ID NOs: 28-38, wherein such a polynucleotide or gene encodes, or such a polypeptide has, the activity of the component of a stress response pathway such as the activity of Ybp1, Trx2, Gsh1, Gsh2, Trr1, Gpx2, Tsa1, Ahp1, or Glr1, respectively. In some embodiments, the yeast activator protein polynucleotides, genes, and/or polypeptides may have at least about 70%, at least about 75%, at least about 80%, at least about 85%, at least about 90%, at least about 95%, at least about 96%, at least about 97%, at least about 98%, or at least about 99% sequence identity to SEQ ID NOs: 28-38, wherein such a polynucleotide or gene encodes, or such a polypeptide has, the activity of the component of a stress response pathway such as the activity of Ybp1, Trx2, Gsh1, Gsh2, Trr1, Gpx2, Tsa1, Ahp1, or Glr1, respectively. Still other examples of polynucleotides, genes, and polypeptides of a stress response pathway that may be targeted for modification or inactivation in a recombinant host cell disclosed herein include, but are not limited to, an active variant, fragment, or derivative of SEQ ID NOs: 28-38, wherein such a polynucleotide or gene encodes, or such a polypeptide has, the activity of the component of a stress response pathway such as the activity of Ybp1, Trx2, Gsh1, Gsh2, Trr1, Gpx2, Tsa1, Ahp1, or Glr1, respectively.

[0226] In some embodiments, the sequences of other polynucleotides, genes, and/or polypeptides of a stress response pathway may be identified in the literature and in bioinformatics databases well known to the skilled person using sequences disclosed herein and available in the art. For example, such sequences may be identified through BLAST searching of publicly available databases with known polynucleotide or polypeptide sequences of components of a stress response pathway. In such a method, identities may be based on the Clustal W method of alignment using the default parameters of GAP PENALTY=10, GAP LENGTH PENALTY=0.1, and Gonnet 250 series of protein weight matrix.

[0227] Additionally, the polynucleotide or polypeptide sequences of components of a stress response pathway disclosed herein or known the art may be used to identify other homologs of components of a stress response pathway in nature. For example, the nucleic acid fragments of components of a stress response pathway disclosed herein may be used to isolate genes encoding homologous proteins. Isolation of homologous genes using sequence-dependent protocols is well known in the art. Examples of sequence-dependent protocols include, but are not limited to methods of nucleic acid hybridization; methods of DNA and RNA amplification, as exemplified by various uses of nucleic acid amplification technologies (e.g., polymerase chain reaction (PCR), U.S. Pat. No. 4,683,202; ligase chain reaction (LCR), Tabor, et al., Proc. Acad. Sci. U.S.A. 82:1074, 1985; or strand displacement amplification (SDA), Walker, et al., Proc. Natl. Acad. Sci. U.S.A., 89:392, 1992); and methods of library construction and screening by complementation.

[0228] In some embodiments, polynucleotides, genes, and/or polypeptides of a stress response pathway related to a recombinant host cell disclosed herein may be modified, for example, overexpressed or disrupted. Many methods for genetic modification of target genes to increase, reduce, or eliminate expression are known to one of ordinary skill in the art and may be used to create a recombinant host cell disclosed herein. The modification of a component of a stress response pathway in a recombinant host cell disclosed herein may be confirmed using methods known in the art. For example, disruption of a particular component of a stress response pathway may be confirmed with PCR screening using primers internal and external to the gene or by Southern blot using a probe designed to the gene sequence.

### Biosynthetic Pathways

[0229] In some embodiments, the recombinant host cell may further comprise a butanol biosynthetic pathway as described herein. In some embodiments, the recombinant host cell may comprise an isobutanol biosynthetic pathway, a 1-butanol biosynthetic pathway, a 2-butanol biosynthetic pathway, or a 2-butanone biosynthetic pathway. In some embodiments, the recombinant host cell may comprise one or more polynucleotides encoding one or more polypeptides that catalyzes substrate to product conversions of these biosynthetic pathway. The substrate to product conversions of the isobutanol biosynthetic pathway, a 1-butanol biosynthetic pathway, a 2-butanol biosynthetic pathway, and a 2-butanone biosynthetic pathway are described herein.

[0230] Biosynthetic pathways for the production of isobutanol that may be used include those described in U.S. Pat. No. 7,851,188, the entire contents of which are herein incorporated by reference. In some embodiments, the isobutanol biosynthetic pathway comprises the following substrate to product conversions:
[0231] a) pyruvate to acetolactate, which may be catalyzed, for example, by acetolactate synthase;
[0232] b) acetolactate to 2,3-dihydroxyisovalerate, which may be catalyzed, for example, by acetohydroxy acid reductoisomerase;
[0233] c) 2,3-dihydroxyisovalerate to α-ketoisovalerate, which may be catalyzed, for example, by acetohydroxy acid dehydratase;
[0234] d) α-ketoisovalerate to isobutyraldehyde, which may be catalyzed, for example, by a branched-chain α-keto acid decarboxylase; and
[0235] e) isobutyraldehyde to isobutanol, which may be catalyzed, for example, by a branched-chain alcohol dehydrogenase.

[0236] In some embodiments, the isobutanol biosynthetic pathway comprises the following substrate to product conversions:
[0237] a) pyruvate to acetolactate, which may be catalyzed, for example, by acetolactate synthase;
[0238] b) acetolactate to 2,3-dihydroxyisovalerate, which may be catalyzed, for example, by ketol-acid reductoisomerase;
[0239] c) 2,3-dihydroxyisovalerate to a-ketoisovalerate, which may be catalyzed, for example, by dihydroxyacid dehydratase;
[0240] d) α-ketoisovalerate to valine, which may be catalyzed, for example, by transaminase or valine dehydrogenase;
[0241] e) valine to isobutylamine, which may be catalyzed, for example, by valine decarboxylase;
[0242] f) isobutylamine to isobutyraldehyde, which may be catalyzed by, for example, omega transaminase; and
[0243] g) isobutyraldehyde to isobutanol, which may be catalyzed, for example, by a branched-chain alcohol dehydrogenase.

[0244] In some embodiments, the isobutanol biosynthetic pathway comprises the following substrate to product conversions:
[0245] a) pyruvate to acetolactate, which may be catalyzed, for example, by acetolactate synthase;
[0246] b) acetolactate to 2,3-dihydroxyisovalerate, which may be catalyzed, for example, by acetohydroxy acid reductoisomerase;
[0247] c) 2,3-dihydroxyisovalerate to α-ketoisovalerate, which may be catalyzed, for example, by acetohydroxy acid dehydratase;
[0248] d) α-ketoisovalerate to isobutyryl-CoA, which may be catalyzed, for example, by branched-chain keto acid dehydrogenase;
[0249] e) isobutyryl-CoA to isobutyraldehyde, which may be catalyzed, for example, by acelylating aldehyde dehydrogenase; and
[0250] f) isobutyraldehyde to isobutanol, which may be catalyzed, for example, by a branched-chain alcohol dehydrogenase.

[0251] Biosynthetic pathways for the production of 1-butanol that may be used include those described in U.S. Patent Application Publication No. 2008/0182308, the entire contents of which are herein incorporated by reference. In some embodiments, the 1-butanol biosynthetic pathway comprises the following substrate to product conversions:
[0252] a) acetyl-CoA to acetoacetyl-CoA, which may be catalyzed, for example, by acetyl-CoA acetyltransferase;
[0253] b) acetoacetyl-CoA to 3-hydroxybutyryl-CoA, which may be catalyzed, for example, by 3-hydroxybutyryl-CoA dehydrogenase;
[0254] c) 3-hydroxybutyryl-CoA to crotonyl-CoA, which may be catalyzed, for example, by crotonase;
[0255] d) crotonyl-CoA to butyryl-CoA, which may be catalyzed, for example, by butyryl-CoA dehydrogenase;
[0256] e) butyryl-CoA to butyraldehyde, which may be catalyzed, for example, by butyraldehyde dehydrogenase; and
[0257] f) butyraldehyde to 1-butanol, which may be catalyzed, for example, by butanol dehydrogenase.

[0258] Biosynthetic pathways for the production of 2-butanol that may be used include those described in U.S. Patent Application Publication No. 2007/0259410 and U.S. Patent Application Publication No. 2009/0155870, the entire contents of which are herein incorporated by reference. In some embodiments, the 2-butanol biosynthetic pathway comprises the following substrate to product conversions:
[0259] a) pyruvate to alpha-acetolactate, which may be catalyzed, for example, by acetolactate synthase;
[0260] b) alpha-acetolactate to acetoin, which may be catalyzed, for example, by acetolactate decarboxylase;
[0261] c) acetoin to 3-amino-2-butanol, which may be catalyzed, for example, acetonin aminase;
[0262] d) 3-amino-2-butanol to 3-amino-2-butanol phosphate, which may be catalyzed, for example, by aminobutanol kinase;
[0263] e) 3-amino-2-butanol phosphate to 2-butanone, which may be catalyzed, for example, by aminobutanol phosphate phosphorylase; and
[0264] f) 2-butanone to 2-butanol, which may be catalyzed, for example, by butanol dehydrogenase.

[0265] In some embodiments, the 2-butanol biosynthetic pathway comprises the following substrate to product conversions:
[0266] a) pyruvate to alpha-acetolactate, which may be catalyzed, for example, by acetolactate synthase;
[0267] b) alpha-acetolactate to acetoin, which may be catalyzed, for example, by acetolactate decarboxylase;
[0268] c) acetoin to 2,3-butanediol, which may be catalyzed, for example, by butanediol dehydrogenase;
[0269] d) 2,3-butanediol to 2-butanone, which may be catalyzed, for example, by dial dehydratase; and
[0270] e) 2-butanone to 2-butanol, which may be catalyzed, for example, by butanol dehydrogenase.

[0271] Biosynthetic pathways for the production of 2-butanone that may be used include those described in U.S. Patent Application Publication No. 2007/0259410 and U.S. Patent Application Publication No. 2009/0155870, the entire contents of which are herein incorporated by reference. In some embodiments, the 2-butanone biosynthetic pathway comprises the following substrate to product conversions:
[0272] a) pyruvate to alpha-acetolactate, which may be catalyzed, for example, by acetolactate synthase;
[0273] b) alpha-acetolactate to acetoin, which may be catalyzed, for example, by acetolactate decarboxylase;
[0274] c) acetoin to 3-amino-2-butanol, which may be catalyzed, for example, acetonin aminase;
[0275] d) 3-amino-2-butanol to 3-amino-2-butanol phosphate, which may be catalyzed, for example, by aminobutanol kinase; and,
[0276] e) 3-amino-2-butanol phosphate to 2-butanone, which may be catalyzed, for example, by aminobutanol phosphate phosphorylase.

[0277] In some embodiments, the 2-butanone biosynthetic pathway comprises the following substrate to product conversions:
[0278] a) pyruvate to alpha-acetolactate, which may be catalyzed, for example, by acetolactate synthase;
[0279] b) alpha-acetolactate to acetoin which may be catalyzed, for example, by acetolactate decarboxylase;
[0280] c) acetoin to 2,3-butanediol, which may be catalyzed, for example, by butanediol dehydrogenase; and
[0281] d) 2,3-butanediol to 2-butanone, which may be catalyzed, for example, by diol dehydratase.

[0282] In some embodiments, the invention produces butanol from plant-derived carbon sources, avoiding the negative environmental impact associated with standard petrochemical processes for butanol production. In some embodiments, the invention provides a method for the production of butanol using recombinant industrial host cells comprising a butanol pathway.

[0283] In some embodiments, the butanol biosynthetic pathways may comprise at least one polynucleotide, at least two polynucleotides, at least three polynucleotides, at least four polynucleotides, at least five polynucleotides, at least six polynucleotides, or at least seven polynucleotides that is/are heterologous to the host cell. In some embodiments, each substrate to product conversion of a butanol biosynthetic pathway in a recombinant host cell may be catalyzed by a heterologous polypeptide. In some embodiments, the polypeptide catalyzing the substrate to product conversions of acetolactate to 2,3-dihydroxyisovalerate and/or the polypeptide catalyzing the substrate to product conversion of isobutyraldehyde to isobutanol are capable of utilizing NADH (reduced nicotinamide adenine dinucleotide) as a cofactor.

[0284] The term “acetohydroxyacid synthase,” “acetolactate synthase,” and “acetolactate synthetase” (abbreviated “ALS”), and in some instances, may be used interchangeably herein, refer to a polypeptide (or polypeptides) having enzyme activity that catalyzes the conversion of pyruvate to acetolactate and CO₂. Example acetolactate synthases are known by the EC number 2.2.1.6 (Enzyme Nomenclature 1992, Academic Press, San Diego). These unmodified enzymes are available from a number of sources including, but not limited to, Bacillus subtilis (GenBank Nos: CAB15618 (SEQ ID NO: 39), Z99122 (SEQ ID NO: 40), NCBI (National Center for Biotechnology Information) amino acid sequence, NCBI nucleotide sequence, respectively), Klebsiella pneumoniae (GenBank Nos: AAA25079 (SEQ ID NO: 41), M73842 (SEQ ID NO: 42)), and Lactococcus lactis (GenBank Nos: AAA25161 (SEQ ID NO: 43), L16975 (SEQ ID NO: 44)).

[0285] The term “ketol-acid reductoisomerase” (“KARI”), “acetohydroxy acid isomeroreductase,” and “acetohydroxy acid reductoisomerase,” and in some instances, may be used interchangeably herein, refer to a polypeptide (or polypeptides) having enzyme activity that catalyzes the reaction of (S)-acetolactate to 2,3-dihydroxyisovalerate. Example KARI enzymes may be classified as EC number EC 1.1.1.86 (Enzyme Nomenclature 1992, Academic Press, San Diego), and are available from a vast array of microorganisms including, but not limited to, Escherichia coli (GenBank Nos: NP_{—}418222 (SEQ ID NO: 45), NC_{—}000913 (SEQ ID NO: 46)), Saccharomyces cerevisiae (GenBank Nos: NP_{—}013459 (SEQ ID NO: 47), NC_{—}001144 (SEQ ID NO: 48)), Methanococcus maripaludis (GenBank Nos: CAF30210 (SEQ ID NO: 49), BX957220 (SEQ ID NO: 50)), and Bacillus subtilis (GenBank Nos: CAB14789 (SEQ ID NO: 51), Z99118 (SEQ ID NO: 52)). KARIs include Anaerostipes caccae KARI variants “K9G9” and “K9D3” (SEQ ID NOs: 53 and 54, respectively). Ketol-acid reductoisomerase (KARI) enzymes are described in U.S. Patent Application Publication Nos. 2008/0261230, 2009/0163376, and 2010/0197519, and PCT Application Publication No. WO/2011/041415, the entire contents of which are herein incorporated by reference. Examples of KARIs disclosed therein are those from Lactococcus lactis, Vibrio cholera, Pseudomonas aeruginosa PAO1, and Pseudomonas fluorescens PF5 mutants. In some embodiments, the KARI may utilize NADH. In some embodiments, the KARI may utilize NADPH (reduced nicotinamide adenine dinucleotide phosphate).

[0286] The term “acetohydroxy acid dehydratase” and “dihydroxyacid dehydratase” (“DHAD”), and in some instances, may be used interchangeably herein, refer to a polypeptide (or polypeptides) having enzyme activity that catalyzes the conversion of 2,3-dihydroxyisovalerate to α-ketoisovalerate. Example acetohydroxy acid dehydratases are known by the EC number 4.2.1.9. Such enzymes are available from a vast array of microorganisms including, but not limited to, E. coli (GenBank Nos: YP_{—}026248 (SEQ ID NO: 55), NC000913 (SEQ ID NO: 56)), Saccharomyces cerevisiae (GenBank Nos: NP_{—}012550 (SEQ ID NO: 57), NC 001142 (SEQ ID NO: 58)), M. maripaludis (GenBank Nos: CAF29874 (SEQ ID NO: 59), BX957219 (SEQ ID NO: 60)), B. subtilis (GenBank Nos: CAB14105 (SEQ ID NO: 61), Z99115 (SEQ ID NO: 62)), L. lactis, and N. crassa. U.S. Patent Application Publication No. 2010/0081154 and U.S. Pat. No. 7,851,188, the entire contents of which are herein incorporated by reference, describe dihydroxyacid dehydratases (DHADs) including a DHAD from Streptococcus mutans.

[0287] The term “branched-chain α-keto acid decarboxylase,” “α-ketoacid decarboxylase,” “α-ketoisovalerate decarboxylase,” or “2-ketoisovalerate decarboxylase” (“KIVD”), and in some instances, may be used interchangeably herein, refer to a polypeptide (or polypeptides) having enzyme activity that catalyzes the conversion of α-ketoisovalerate to isobutyraldehyde and CO₂. Example branched-chain α-keto acid decarboxylases are known by the EC number 4.1.1.72 and are available from a number of sources including, but not limited to, Lactococcus lactis (GenBank Nos: AAS49166 (SEQ ID NO: 63), AY548760 (SEQ ID NO: 64); CAG34226 (SEQ ID NO: 65), AJ746364 (SEQ ID NO: 66), Salmonella typhimurium (GenBank Nos: NP_{—}461346 (SEQ ID NO: 67), NC_{—}003197 (SEQ ID NO: 68)), Clostridium acetobutylicum (GenBank Nos: NP_{—}149189 (SEQ ID NO: 69), NC_{—}001988 (SEQ ID NO: 70)), M. caseolyticus (SEQ ID NO: 71), and L. grayi (SEQ ID NO: 72).

[0288] The term “branched-chain alcohol dehydrogenase” (“ADH”) refers to a polypeptide (or polypeptides) having enzyme activity that catalyzes the conversion of isobutyraldehyde to isobutanol. Example branched-chain alcohol dehydrogenases are known by the EC number 1.1.1.265, but may also be classified under other alcohol dehydrogenases (specifically, EC 1.1.1.1 or 1.1.1.2). Alcohol dehydrogenases may be NADPH dependent or NADH dependent. Such enzymes are available from a number of sources including, but not limited to, S. cerevisiae (GenBank Nos: NP_{—}010656 (SEQ ID NO: 73), NC_{—}001136 (SEQ ID NO: 74), NP_{—}014051 (SEQ ID NO: 75), NC_{—}001145 (SEQ ID NO: 76)), E. coli (GenBank Nos: NP_{—}417484 (SEQ ID NO: 77), NC_{—}000913 (SEQ ID NO: 78)), C. acetobutylicum (GenBank Nos: NP_{—}349892 (SEQ ID NO: 79), NC_{—}003030 (SEQ ID NO: 80); NP_{—}349891 (SEQ ID NO: 81), NC_{—}003030 (SEQ ID NO: 82)). U.S. Patent Application Publication No. 2009/0269823 describes SadB, an alcohol dehydrogenase (ADH) from Achromobacter xylosoxidans. Alcohol dehydrogenases also include horse liver ADH and Beijerinkia indica ADH (as described by U.S. Patent Application Publication No. 2011/0269199, the entire contents of which are herein incorporated by reference).

[0289] The term “butanol dehydrogenase” refers to a polypeptide (or polypeptides) having enzyme activity that catalyzes the conversion of isobutyraldehyde to isobutanol or the conversion of 2-butanone and 2-butanol. Butanol dehydrogenases are a subset of a broad family of alcohol dehydrogenases. Butanol dehydrogenase may be NAD- or NADP-dependent. The NAD-dependent enzymes are known as EC 1.1.1.1 and are available, for example, from Rhodococcus ruber (GenBank Nos: CAD36475, AJ491307). The NADP-dependent enzymes are known as EC 1.1.1.2 and are available, for example, from Pyrococcus furiosus (GenBank Nos: AAC25556, AF013169). Additionally, a butanol dehydrogenase is available from Escherichia coli (GenBank Nos: NP 417484, NC_{—}000913) and a cyclohexanol dehydrogenase is available from Acinetobacter sp. (GenBank Nos: AAG10026, AF282240). The term “butanol dehydrogenase” also refers to a polypeptide (or polypeptides) having enzyme activity that catalyzes the conversion of butyraldehyde to 1-butanol, using either NADH or NADPH as cofactor. Butanol dehydrogenases are available from, for example, C. acetobutylicum (GenBank Nos: NP_{—}149325, NC_{—}001988; this enzyme possesses both aldehyde and alcohol dehydrogenase activity); NP_{—}349891, NC_{—}003030; and NP_{—}349892, NC_{—}003030) and E. coli (GenBank Nos: NP_{—}417-484, NC_{—}000913).

[0290] The term “branched-chain keto acid dehydrogenase” refers to a polypeptide (or polypeptides) having enzyme activity that catalyzes the conversion of α-ketoisovalerate to isobutyryl-CoA (isobutyryl-coenzyme A), typically using NAD⁺ (nicotinamide adenine dinucleotide) as an electron acceptor. Example branched-chain keto acid dehydrogenases are known by the EC number 1.2.4.4. Such branched-chain keto acid dehydrogenases are comprised of four subunits and sequences from all subunits are available from a vast array of microorganisms including, but not limited to, B. subtilis (GenBank Nos: CAB14336 (SEQ ID NO: 83), Z99116 (SEQ ID NO: 84); CAB14335 (SEQ ID NO: 85), Z99116 (SEQ ID NO: 86); CAB14334 (SEQ ID NO: 87), Z99116 (SEQ ID NO: 88); and CAB14337 (SEQ ID NO: 89), Z99116 (SEQ ID NO: 90)) and Pseudomonas putida (GenBank Nos: AAA65614 (SEQ ID NO: 91), M57613 (SEQ ID NO: 92); AAA65615 (SEQ ID NO: 93), M57613 (SEQ ID NO: 94); AAA65617 (SEQ ID NO: 95), M57613 (SEQ ID NO: 96); and AAA65618 (SEQ ID NO: 97), M57613 (SEQ ID NO: 98)).

[0291] The term “acylating aldehyde dehydrogenase” refers to a polypeptide (or polypeptides) having enzyme activity that catalyzes the conversion of isobutyryl-CoA to isobutyraldehyde, typically using either NADH or NADPH as an electron donor. Example acylating aldehyde dehydrogenases are known by the EC numbers 1.2.1.10 and 1.2.1.57. Such enzymes are available from multiple sources including, but not limited to, Clostridium beijerinckii (GenBank Nos: AAD31841 (SEQ ID NO: 99), AF157306 (SEQ ID NO: 100)), C. acetobutylicum (GenBank Nos: NP_{—}149325 (SEQ ID NO: 101), NC_{—}001988 (SEQ ID NO: 102); NP_{—}149199 (SEQ ID NO: 103), NC_{—}001988 (SEQ ID NO: 104)), P. putida (GenBank Nos: AAA89106 (SEQ ID NO: 105), U13232 (SEQ ID NO: 106)), and Thermus thermophilus (GenBank Nos: YP_{—}145486 (SEQ ID NO: 107), NC_{—}006461 (SEQ ID NO: 108)).

[0292] The term “transaminase” refers to a polypeptide (or polypeptides) having enzyme activity that catalyzes the conversion of α-ketoisovalerate to L-valine, using either alanine or glutamate as an amine donor. Example transaminases are known by the EC numbers 2.6.1.42 and 2.6.1.66. Such enzymes are available from a number of sources. Examples of sources for alanine-dependent enzymes include, but are not limited to, E. coli (GenBank Nos: YP_{—}026231 (SEQ ID NO: 109), NC_{—}000913 (SEQ ID NO: 110)) and Bacillus licheniformis (GenBank Nos: YP_{—}093743 (SEQ ID NO: 111), NC_{—}006322 (SEQ ID NO: 112)). Examples of sources for glutamate-dependent enzymes include, but are not limited to, E. coli (GenBank Nos: YP_{—}026247 (SEQ ID NO: 113), NC_{—}000913 (SEQ ID NO: 114)), Saccharomyces cerevisiae (GenBank Nos: NP_{—}012682 (SEQ ID NO: 115), NC_{—}001142 (SEQ ID NO: 116)) and Methanobacterium thermoautotrophicum (GenBank Nos: NP_{—}276546 (SEQ ID NO: 117), NC_{—}000916 (SEQ ID NO: 118)).

[0293] The term “valine dehydrogenase” refers to a polypeptide (or polypeptides) having enzyme activity that catalyzes the conversion of α-ketoisovalerate to L-valine, typically using NAD(P)H as an electron donor and ammonia as an amine donor. Example valine dehydrogenases are known by the EC numbers 1.4.1.8 and 1.4.1.9 and such enzymes are available from a number of sources including, but not limited to, Streptomyces coelicolor (GenBank Nos: NP_{—}628270 (SEQ ID NO: 119), NC_{—}003888 (SEQ ID NO: 120)) and B. subtilis (GenBank Nos: CAB14339 (SEQ ID NO: 121), Z99116 (SEQ ID NO: 122)).

[0294] The term “valine decarboxylase” refers to a polypeptide (or polypeptides) having enzyme activity that catalyzes the conversion of L-valine to isobutylamine and CO₂. Example valine decarboxylases are known by the EC number 4.1.1.14. Such enzymes are found in Streptomyces such as, for example, Streptomyces viridifaciens (GenBank Nos: AAN10242 (SEQ ID NO: 123), AY116644 (SEQ ID NO: 124)).

[0295] The term “omega transaminase” refers to a polypeptide (or polypeptides) having enzyme activity that catalyzes the conversion of isobutylamine to isobutyraldehyde using a suitable amino acid as an amine donor. Example omega transaminases are known by the EC number 2.6.1.18 and are available from a number of sources including, but not limited to, Alcaligenes denitrificans (AAP92672 (SEQ ID NO: 125), AY330220 (SEQ ID NO: 126)), Ralstonia eutropha (GenBank Nos: YP_{—}294474 (SEQ ID NO: 127), NC_{—}007347 (SEQ ID NO: 128)), Shewanella oneidensis (GenBank Nos: NP_{—}719046 (SEQ ID NO: 129), NC_{—}004347 (SEQ ID NO: 130)), and P. putida (GenBank Nos: AAN66223 (SEQ ID NO: 131), AE016776 (SEQ ID NO: 132)).

[0296] The term “acetyl-CoA acetyltransferase” refers to a polypeptide (or polypeptides) having enzyme activity that catalyzes the conversion of two molecules of acetyl-CoA to acetoacetyl-CoA and coenzyme A (CoA). Example acetyl-CoA acetyltransferases are acetyl-CoA acetyltransferases with substrate preferences (reaction in the forward direction) for a short chain acyl-CoA and acetyl-CoA and are classified as E.C. 2.3.1.9 [Enzyme Nomenclature 1992, Academic Press, San Diego]; although, enzymes with a broader substrate range (E.C. 2.3.1.16) will be functional as well. Acetyl-CoA acetyltransferases are available from a number of sources, for example, Escherichia coli (GenBank Nos: NP_{—}416728, NC_{—}000913; NCBI amino acid sequence, NCBI nucleotide sequence)), Clostridium acetobutylicum (GenBank Nos: NP_{—}349476.1, NC_{—}003030; NP_{—}149242, NC_{—}001988, Bacillus subtilis (GenBank Nos: NP_{—}390297, NC_{—}000964), and Saccharomyces cerevisiae (GenBank Nos: NP_{—}015297, NC_{—}001148).

[0297] The term “3-hydroxybutyryl-CoA dehydrogenase” refers to a polypeptide (or polypeptides) having enzyme activity that catalyzes the conversion of acetoacetyl-CoA to 3-hydroxybutyryl-CoA. Example 3-hydroxybutyryl-CoA dehydrogenases may be reduced nicotinamide adenine dinucleotide (NADH)-dependent, with a substrate preference for (S)-3-hydroxybutyryl-CoA or (R)-3-hydroxybutyryl-CoA. Examples may be classified as E.C. 1.1.1.35 and E.C. 1.1.1.30, respectively. Additionally, 3-hydroxybutyryl-CoA dehydrogenases may be reduced nicotinamide adenine dinucleotide phosphate (NADPH)-dependent, with a substrate preference for (S)-3-hydroxybutyryl-CoA or (R)-3-hydroxybutyryl-CoA and are classified as E.C. 1.1.1.157 and E.C. 1.1.1.36, respectively. 3-Hydroxybutyryl-CoA dehydrogenases are available from a number of sources, for example, C. acetobutylicum (GenBank Nos: NP_{—}349314, NC_{—}003030), B. subtilis (GenBank Nos: AAB09614, U29084), Ralstonia eutropha (GenBank Nos: YP_{—}294481, NC_{—}007347), and Alcaligenes eutrophus (GenBank Nos: AAA21973, J04987).

[0298] The term “crotonase” refers to a polypeptide (or polypeptides) having enzyme activity that catalyzes the conversion of 3-hydroxybutyryl-CoA to crotonyl-CoA and H₂O. Example crotonases may have a substrate preference for (S)-3-hydroxybutyryl-CoA or (R)-3-hydroxybutyryl-CoA and may be classified as E.C. 4.2.1.17 and E.C. 4.2.1.55, respectively. Crotonases are available from a number of sources, for example, E. coli (GenBank Nos: NP_{—}415911, NC_{—}000913), C. acetobutylicum (GenBank Nos: NP_{—}349318, NC_{—}003030), B. subtilis (GenBank Nos: CAB13705, Z99113), and Aeromonas caviae (GenBank Nos: BAA21816, D88825).

[0299] The term “butyryl-CoA dehydrogenase” refers to a polypeptide (or polypeptides) having enzyme activity that catalyzes the conversion of crotonyl-CoA to butyryl-CoA. Example butyryl-CoA dehydrogenases may be NADH-dependent, NADPH-dependent, or flavin-dependent and may be classified as E.C. 1.3.1.44, E.C. 1.3.1.38, and E.C. 1.3.99.2, respectively. Butyryl-CoA dehydrogenases are available from a number of sources, for example, C. acetobutylicum (GenBank Nos: NP_{—}347102, NC_{—} 003030), Euglena gracilis (GenBank Nos: Q5EU90), AY741582), Streptomyces collinus (GenBank Nos: AAA92890, U37135), and Streptomyces coelicolor (GenBank Nos: CAA22721, AL939127).

[0300] The term “butyraldehyde dehydrogenase” refers to a polypeptide (or polypeptides) having enzyme activity that catalyzes the conversion of butyryl-CoA to butyraldehyde, using NADH or NADPH as cofactor. Butyraldehyde dehydrogenases with a preference for NADH are known as E.C. 1.2.1.57 and are available from, for example, Clostridium beijerinckii (GenBank Nos: AAD31841, AF157306) and C. acetobutylicum (GenBank Nos: NP.sub.--149325, NC.sub.--001988).

[0301] The term “isobutyryl-CoA mutase” refers to a polypeptide (or polypeptides) having enzyme activity that catalyzes the conversion of butyryl-CoA to isobutyryl-CoA. This enzyme uses coenzyme B₁₂ as cofactor. Example isobutyryl-CoA mutases are known by the EC number 5.4.99.13. These enzymes are found in a number of Streptomyces including, but not limited to, Streptomyces cinnamonensis (GenBank Nos: AAC08713 (SEQ ID NO: 133), U67612 (SEQ ID NO: 134); CAB59633 (SEQ ID NO: 135), AJ246005 (SEQ ID NO: 136)), S. coelicolor (GenBank Nos: CAB70645 (SEQ ID NO: 137), AL939123 (SEQ ID NO: 138); CAB92663 (SEQ ID NO: 139), AL939121 (SEQ ID NO: 140)), and Streptomyces avermitilis (GenBank Nos: NP_{—}824008 (SEQ ID NO: 141), NC_{—}003155 (SEQ ID NO: 142); NP_{—}824637 (SEQ ID NO: 143), NC_{—}003155 (SEQ ID NO: 144)).

[0302] The term “acetolactate decarboxylase” refers to a polypeptide (or polypeptides) having enzyme activity that catalyzes the conversion of alpha-acetolactate to acetoin. Example acetolactate decarboxylases are known as EC 4.1.1.5 and are available, for example, from Bacillus subtilis (GenBank Nos: AAA22223, L04470), Klebsiella terrigena (GenBank Nos: AAA25054, L04507), and Klebsiella pneumoniae (GenBank Nos: AAU43774, AY722056).

[0303] The term “acetoin aminase” or “acetoin transaminase,” and in some instances, may be used interchangeably herein, refer to a polypeptide (or polypeptides) having enzyme activity that catalyzes the conversion of acetoin to 3-amino-2-butanol. Acetoin aminase may utilize the cofactor pyridoxal 5′-phosphate or NADH or NADPH. The resulting product may have (R) or (S) stereochemistry at the 3-position. The pyridoxal phosphate-dependent enzyme may use an amino acid such as alanine or glutamate as the amino donor. The NADH- and NADPH-dependent enzymes may use ammonia as a second substrate. A suitable example of an NADH dependent acetoin aminase, also known as amino alcohol dehydrogenase, is described by Ito, et al. (U.S. Pat. No. 6,432,688). An example of a pyridoxal-dependent acetoin aminase is the amine:pyruvate aminotransferase (also called amine:pyruvate transaminase) described by Shin and Kim (J. Org. Chem. 67:2848-2853, 2002).

[0304] The term “acetoin kinase” refers to a polypeptide (or polypeptides) having enzyme activity that catalyzes the conversion of acetoin to phosphoacetoin. Acetoin kinase may utilize ATP (adenosine triphosphate) or phosphoenolpyruvate as the phosphate donor in the reaction. Enzymes that catalyze the analogous reaction on the similar substrate dihydroxyacetone, for example, include enzymes known as EC 2.7.1.29 (Garcia-Alles, et al., Biochemistry 43:13037-13046, 2004).

[0305] The term “acetoin phosphate aminase” refers to a polypeptide (or polypeptides) having enzyme activity that catalyzes the conversion of phosphoacetoin to 3-amino-2-butanol O-phosphate. Acetoin phosphate aminase may use the cofactor pyridoxal 5′-phosphate, NADH, or NADPH. The resulting product may have (R) or (S) stereochemistry at the 3-position. The pyridoxal phosphate-dependent enzyme may use an amino acid such as alanine or glutamate. The NADH and NADPH-dependent enzymes may use ammonia as a second substrate. Although there are no reports of enzymes catalyzing this reaction on phosphoacetoin, there is a pyridoxal phosphate-dependent enzyme that is proposed to carry out the analogous reaction on the similar substrate serinol phosphate (Yasuta, et al., Appl. Environ. Microbial. 67:4999-5009, 2001).

[0306] The term “aminobutanol phosphate phospholyase,” also called “amino alcohol O-phosphate lyase,” and in some instances, may be used interchangeably herein, refers to a polypeptide (or polypeptides) having enzyme activity that catalyzes the conversion of 3-amino-2-butanol O-phosphate to 2-butanone. Amino butanol phosphate phospho-lyase may utilize the cofactor pyridoxal 5′-phosphate. There are reports of enzymes that catalyze the analogous reaction on the similar substrate 1-amino-2-propanol phosphate (Jones, et al., Biochem J. 134:167-182, 1973). U.S. Patent Application Publication No. 2007/0259410 describes an aminobutanol phosphate phospho-lyase from the organism Erwinia carotovora.

[0307] The term “aminobutanol kinase” refers to a polypeptide (or polypeptides) having enzyme activity that catalyzes the conversion of 3-amino-2-butanol to 3-amino-2-butanol O-phosphate. Amino butanol kinase may utilize ATP as the phosphate donor. Although there are no reports of enzymes catalyzing this reaction on 3-amino-2-butanol, there are reports of enzymes that catalyze the analogous reaction on the similar substrates ethanolamine and 1-amino-2-propanol (Jones, et al., supra). U.S. Patent Application Publication No. 2009/0155870 describes, in Example 14, an amino alcohol kinase of Erwinia carotovora subsp. Atroseptica.

[0308] The term “butanediol dehydrogenase,” also known as “acetoin reductase,” and in some instances, may be used interchangeably herein, refers to a polypeptide (or polypeptides) having enzyme activity that catalyzes the conversion of acetoin to 2,3-butanediol. Butanedial dehydrogenases are a subset of the broad family of alcohol dehydrogenases. Butanediol dehydrogenase enzymes may have specificity for production of (R)- or (S)-stereochemistry in the alcohol product. (S)-specific butanediol dehydrogenases are known as EC 1.1.1.76 and are available, for example, from Klebsiella pneumoniae (GenBank Nos: BBA13085, D86412). (R)-specific butanediol dehydrogenases are known as EC 1.1.1.4 and are available, for example, from Bacillus cereus (GenBank Nos. NP 830481, NC_{—}004722; AAP07682, AE017000), and Lactococcus lactis (GenBank Nos. AAK04995, AE006323).

[0309] The term “butanediol dehydratase,” also known as “dial dehydratase” or “propanediol dehydratase,” and in some instances, may be used interchangeably herein, refers to a polypeptide (or polypeptides) having an enzyme activity that catalyzes the conversion of 2,3-butanediol to 2-butanone. Butanediol dehydratase may utilize the cofactor adenosyl cobalamin (also known as coenzyme Bw or vitamin B12; although vitamin B12 may refer also to other forms of cobalamin that are not coenzyme B12). Adenosyl cobalamin-dependent enzymes are known as EC 4.2.1.28 and are available, for example, from Klebsiella oxytoca [(GenBank Nos: AA08099 (alpha subunit), D45071; BAA08100 (beta subunit), D45071; and BBA08101 (gamma subunit), D45071 (Note all three subunits are required for activity)], and Klebsiella pneumonia (GenBank Nos: AAC98384 (alpha subunit), AF102064; GenBank Nos: AAC98385 (beta subunit), AF102064, GenBank Nos: AAC98386 (gamma subunit), AF102064). Other suitable dial dehydratases include, but are not limited to, B12-dependent dial dehydratases available from Salmonella typhimurium (GenBank Nos: AAB84102 (large subunit), AF026270; GenBank Nos: AAB84103 (medium subunit), AF026270; GenBank Nos: AAB84104 (small subunit), AF026270); and Lactobacillus collinoides (GenBank Nos: CAC82541 (large subunit), AJ297723; GenBank Nos: CAC82542 (medium subunit); AJ297723; GenBank Nos: CAD01091 (small subunit), AJ297723); and enzymes from Lactobacillus brevis (particularly strains CNRZ 734 and CNRZ 735, Speranza, et al., J. Agric. Food Chem. 45:3476-3480, 1997), and nucleotide sequences that encode the corresponding enzymes. Methods of dial dehydratase gene isolation are well known in the art (e.g., U.S. Pat. No. 5,686,276).

[0310] The term “pyruvate decarboxylase” refers to a polypeptide (or polypeptides) having an enzyme activity that catalyzes the decarboxylation of pyruvic acid to acetaldehyde and carbon dioxide. Pyruvate dehydrogenases are known by the EC number 4.1.1.1. These enzymes are found in a number of yeast including Saccharomyces cerevisiae (GenBank Nos: CAA97575 (SEQ ID NO: 145), CAA97705 (SEQ ID NO: 147), CAA97091 (SEQ ID NO: 149)).

[0311] It will be appreciated that host cells comprising a butanol biosynthetic pathway as provided herein may further comprise one or more additional modifications. U.S. Patent Application Publication No. 2009/0305363, the entire contents of which are herein incorporated by reference, discloses increased conversion of pyruvate to acetolactate by engineering yeast for expression of a cytosol-localized acetolactate synthase and substantial elimination of pyruvate decarboxylase activity. In some embodiments, the host cells comprise modifications to reduce glycerol-3-phosphate dehydrogenase activity and/or disruption in at least one gene encoding a polypeptide having pyruvate decarboxylase activity or a disruption in at least one gene encoding a regulatory element controlling pyruvate decarboxylase gene expression as described in U.S. Patent Application Publication No. 2009/0305363, modifications to a host cell that provide for increased carbon flux through an Entner-Doudoroff Pathway or reducing equivalents balance as described in U.S. Patent Application Publication No. 2010/0120105, the entire contents of which are herein incorporated by reference. Other modifications include integration of at least one polynucleotide encoding a polypeptide that catalyzes a step in a pyruvate-utilizing biosynthetic pathway. Other modifications include at least one deletion, mutation, insertion, and/or substitution in an endogenous polynucleotide encoding a polypeptide having acetolactate reductase activity. In some embodiments, the polypeptide having acetolactate reductase activity is YMR226C (SEQ ID NOs: 165, 166) of Saccharomyces cerevisiae or a homolog thereof. Additional modifications include a deletion, mutation, insertion, and/or substitution in an endogenous polynucleotide encoding a polypeptide having aldehyde dehydrogenase and/or aldehyde oxidase activity. In some embodiments, the polypeptide having aldehyde dehydrogenase activity is ALD6 from Saccharomyces cerevisiae or a homolog thereof. A genetic modification which has the effect of reducing glucose repression wherein the yeast production host cell is pdc- is described in U.S. Patent Application Publication No. 2011/0124060, the entire contents of which are herein incorporated by reference. In some embodiments, the pyruvate decarboxylase that is deleted or down-regulated is PDC1, PDC5, PDC6, or combinations thereof. In some embodiments, the pyruvate decarboxylase is selected from those enzymes in Table 7. In some embodiments, host cells may contain a deletion or down-regulation of a polynucleotide encoding a polypeptide that catalyzes the conversion of glyceraldehyde-3-phosphate to glycerate 1,3, bisphosphate. In some embodiments, the enzyme that catalyzes this reaction is glyceraldehyde-3-phosphate dehydrogenase.

TABLE 7
SEQ ID Numbers of PDC Target Gene coding regions and Proteins

| | SEQ ID NO: | SEQ ID NO: |
|---|---|---|
| Description | Amino Acid | Nucleic Acid |
| PDC1 pyruvate | 145 | 146 |
| decarboxylase from | | |
| Saccharomyces cerevisiae | | |
| PDC5 pyruvate | 147 | 148 |
| decarboxylase from | | |
| Saccharomyces cerevisiae | | |
| PDC6 pyruvate | 149 | 150 |
| decarboxylase | | |
| Saccharomyces cerevisiae | | |
| pyruvate decarboxylase | 151 | 152 |
| from Candida glabrata | | |
| PDC1 pyruvate | 153 | 154 |
| decarboxylase from Pichia | | |
| stipitis | | |
| PDC2 pyruvate | 155 | 156 |
| decarboxylase from Pichia | | |
| stipitis | | |
| pyruvate decarboxylase | 157 | 158 |
| from Kluyveromyces lactis | | |
| pyruvate decarboxylase | 159 | 160 |
| from Yarrowia lipolytica | | |
| pyruvate decarboxylase | 161 | 162 |
| from Schizosaccharomyces | | |
| pombe | | |
| pyruvate decarboxylase | 163 | 164 |
| from Zygosaccharomyces | | |
| rouxii | | |

[0312] Yeasts may have one or more genes encoding pyruvate decarboxylase. For example, there is one gene encoding pyruvate decarboxylase in Candida glabrata and Schizosaccharomyces pombe, while there are three isozymes of pyruvate decarboxylase encoded by the PDC1, PCD5, and PDC6 genes in Saccharomyces. In some embodiments, at least one PDC gene may be inactivated. If the yeast cell used has more than one expressed (active) PDC gene, then each of the active PDC genes may be modified or inactivated thereby producing a pdc-cell. For example, in Saccharomyces cerevisiae, the PDC1, PDC5, and PDC6 genes may be modified or inactivated. If a PDC gene is not active under the fermentation conditions to be used, then such a gene would not need to be modified or inactivated.

[0313] Other target genes, such as those encoding pyruvate decarboxylase proteins having at least about 70% to at least about 75%, at least about 75% to at least about 80%, at least about 80% to at least about 85%, at least about 85% to at least about 90%, at least about 90% to at least about 95%, at least about 96%, at least about 97%, at least about 98%, or at least about 99% sequence identity to the pyruvate decarboxylases of SEQ ID NOs: 145, 147, 149, 151, 153, 155, 157, 159, 161, or 163 may be identified in the literature and in bioinformatics databases well known to the skilled person. In some embodiments, target genes, such as those encoding pyruvate decarboxylase proteins having at least about 70%, at least about 75%, at least about 80%, at least about 85%, at least about 90%, at least about 95%, at least about 96%, at least about 97%, at least about 98%, or at least about 99% sequence identity to the pyruvate decarboxylases of SEQ ID NOs: 145, 147, 149, 151, 153, 155, 157, 159, 161, or 163 may be identified in the literature and in bioinformatics databases well known to the skilled person.

[0314] Recombinant host cells may further comprise (a) at least one heterologous polynucleotide encoding a polypeptide having dihydroxy-acid dehydratase activity; and (b)(i) at least one deletion, mutation, insertion, and/or substitution in an endogenous gene encoding a polypeptide affecting Fe—S cluster biosynthesis; and/or (ii) at least one heterologous polynucleotide encoding a polypeptide affecting Fe—S cluster biosynthesis. In some embodiments, the polypeptide affecting Fe—S cluster biosynthesis may be encoded by AFT1, AFT2, FRA2, GRX3 or CCC1. AFT1 and AFT2 are described in PCT Application Publication No. WO 2001/103300, the entire contents of which are herein incorporated by reference. In some embodiments, the polypeptide affecting Fe—S cluster biosynthesis may be constitutive mutant AFT1 L99A, AFT1 L102A, AFT1 C291F, or AFT1 C293F. In some embodiments, the recombinant host cell may further comprise a deletion, mutation, insertion, and/or substitution in glycerol dehydrogenase (GPD2) or phosphodiesterase (PDE1). In some embodiments, the recombinant host cell may further comprise reduced or eliminated Gpd2 activity. In some embodiments, the recombinant host cell may further comprise reduced or eliminated Pde1 activity.

### Butanol Production

[0315] Disclosed herein are processes suitable for production of butanol from a carbon substrate and employing a recombinant host cell. In some embodiments, recombinant host cells may comprise an isobutanol biosynthetic pathway such as, but not limited to, isobutanol biosynthetic pathways disclosed herein. The ability to utilize carbon substrates to produce isobutanol may be confirmed using methods known in the art including, but not limited to, those described in U.S. Pat. No. 7,851,188, the entire contents of which are herein incorporated by reference. For example, to confirm utilization of sucrose to produce isobutanol, the concentration of isobutanol in the culture media may be determined by a number of methods known in the art such as a specific high performance liquid chromatography (HPLC) method utilizing a Shodex SH-1011 column with a Shodex SH-G guard column (Waters Corporation, Milford, Mass.), with refractive index (RI) detection. Chromatographic separation may be achieved using 0.01 M H₂SO₄ as the mobile phase with a flow rate of 0.5 mL/min and a column temperature of 50° C., and isobutanol has a retention time of 46.6 min under these conditions. Alternatively, gas chromatography (GC) methods are available such as a specific GC method utilizing an HP-INNOWax column (30 m×0.53 mm id, 1 μm film thickness, Agilent Technologies, Wilmington, Del.) with a flame ionization detector (FID). The carrier gas is helium at a flow rate of 4.5 mL/min, measured at 150° C. with constant head pressure; injector split is 1:25 at 200° C.; oven temperature is 45° C. for 1 min, 45° C. to 220° C. at 10° C./min, and 220° C. for 5 min; and FID detection is employed at 240° C. with 26 mL/min helium makeup gas. The retention time of isobutanol is 4.5 min under these conditions.

[0316] An embodiment of the invention is directed to a process for producing butanol comprising:
[0317] (a) providing a recombinant host cell, wherein the host cell produces butanol;
[0318] (b) contacting the recombinant host cell with one or more carbon substrates under conditions wherein butanol is produced at an effective yield;
[0319] (c) collecting the recombinant host cell;
[0320] (d) recovering butanol;
[0321] (e) contacting the collected recombinant host cell of (c) with one or more carbon substrates under conditions wherein butanol is produced at an effective yield;
[0322] (f) optionally repeating steps (c)-(e).

[0323] In some embodiments, butanol is recovered at a concentration of at least about 6 g/L. In some embodiments, the effective yield of step (e) is at least about 90% of the effective yield of (b). In some embodiments, the recombinant host cell is exposed for at least about one hour and/or in the presence of at least about 0.3% butanol. In some embodiments, the butanol produced is isobutanol. In some embodiments, the butanol produced is 1-butanol. In some embodiments, the butanol produced is 2-butanol. In some embodiments, the butanol produced is 2-butanone.

[0324] In some embodiments, the recombinant host cell may be engineered. In some embodiments, the engineered recombinant host cell may comprise a butanol biosynthetic pathway. In some embodiments, the butanol biosynthetic pathway may be a 1-butanol biosynthetic pathway, 2-butanol biosynthetic pathway, isobutanol biosynthetic pathway, or 2-butanone biosynthetic pathway. In some embodiments, the recombinant host cell is a butanologen. In some embodiments, the recombinant host cell is an isobutanologen. In some embodiments, the recombinant host cell is yeast. In some embodiments, the recombinant host cell is a member of a genus of Saccharomyces, Schizosaccharomyces, Hansenula, Candida, Kluyveromyces, Yarrowia, Issatchenkia, or Pichia. In some embodiments, the recombinant host cell is Saccharomyces cerevisiae.

[0325] In some embodiments, the recombinant host cell may also contain one or more polypeptides selected from a group of enzymes having the following Enzyme Commission Numbers: EC 2.2.1.6, EC 1.1.1.86, EC 4.2.1.9, EC 4.1.1.72, EC 1.1.1.1, EC 1.1.1.265, EC 1.1.1.2, EC 1.2.4.4, EC 1.3.99.2, EC 1.2.1.57, EC 1.2.1.10, EC 2.6.1.66, EC 2.6.1.42, EC 1.4.1.9, EC 1.4.1.8, EC 4.1.1.14, EC 2.6.1.18, EC 2.3.1.9, EC 2.3.1.16, EC 1.1.130, EC 1.1.1.35, EC 1.1.1.157, EC 1.1.1.36, EC 4.2.1.17, EC 4.2.1.55, EC 1.3.1.44, EC 1.3.1.38, EC 5.4.99.13, EC 4.1.1.5, EC 2.7.1.29, EC 1.1.1.76, EC 1.2.1.57, and EC 4.2.1.28.

[0326] In some embodiments, the recombinant host cell may contain one or more polypeptides selected from acetolactate synthase, acetohydroxy acid isomeroreductase, acetohydroxy acid dehydratase, branched-chain alpha-keto acid decarboxylase, branched-chain alcohol dehydrogenase, acylating aldehyde dehydrogenase, branched-chain keto acid dehydrogenase, butyryl-CoA dehydrogenase, butyraldehyde dehydrogenase, transaminase, valine dehydrogenase, valine decarboxylase, omega transaminase, acetyl-CoA acetyltransferase, 3-hydroxybutyryl-CoA dehydrogenase, crotonase, butyryl-CoA dehydrogenase, isobutyryl-CoA mutase, acetolactate decarboxylase, acetonin aminase, butanol dehydrogenase, butyraldehyde dehydrogenase, acetoin kinase, acetoin phosphate aminase, aminobutanol phosphate phospholyase, aminobutanol kinase, butanediol dehydrogenase, and butanediol dehydratase.

[0327] In some embodiments, the carbon substrate may be oligosaccharides, polysaccharides, monosaccharides, or mixtures thereof. In some embodiments, the carbon substrate may be fructose, glucose, lactose, maltose, galactose, sucrose, starch, cellulose, feedstocks, ethanol, lactate, succinate, glycerol, corn mash, sugar cane, biomass, a C5 sugar, such as xylose and arabinose, or mixtures thereof.

[0328] In some embodiments, the recombinant host cell may be present at a cell density of at least about 0.5 gdcw/L at the first contacting with the carbon substrate. In some embodiments, the recombinant host cell may be grown to a cell density of at least about 6 gdcw/L prior to contacting with carbon substrate for the production of isobutanol. In some embodiments, the cell density may be at least about 20 gdcw/L, at least about 25 gdcw/L, or at least about 35 gdcw/L, prior to contact with carbon substrate.

[0329] In some embodiments, the recombinant host cell of step (a) may be have a specific productivity of at least about 0.1 g/gdcw/h. In some embodiments, butanol may be produced at an effective rate of at least about 0.1 g/gdcw/h during the first contacting with the carbon substrate. In some embodiments, the first contacting with the carbon substrate may occur in the presence of an extractant. In some embodiments, the recombinant host cell may maintain a sugar uptake rate of at least about 1.0 g/gdcw/h. In some embodiments, the recombinant host cell may maintain a sugar uptake rate of at least about 0.5 g/g/hr. In some embodiments, the glucose utilization rate may be at least about 2.5 g/gdcw/h. In some embodiments, the sucrose uptake rate may be at least about 2.5 g/gdcw/h. In some embodiments, the combined glucose and fructose uptake rate may be at least about 2.5 g/gdcw/h. In some embodiments, contacting with the carbon substrate may occur in anaerobic conditions. In some embodiments, contacting with the carbon substrate may occur in microaerobic conditions.

[0330] In some embodiments, the engineered isobutanol pathway may comprise the following substrate to product conversions:

[0331] a. pyruvate to acetolactate

[0332] b. acetolactate to 2,3-dihydroxyisovalerate

[0333] c. 2,3-dihydroxyisovalerate to α-ketoisovalerate

[0334] d. α-ketoisovalerate to isobutyraldehyde, and

[0335] e. isobutyraldehyde to isobutanol.

[0336] In some embodiments, one or more of the substrate to product conversions may utilize NADH or NADPH as a cofactor. In some embodiments, the recombinant host cell comprises an engineered enzyme which catalyzed the substrate to product conversion acetolactate to 2,3-dihydroxyisovalerate.

[0337] The present invention is also directed to compositions comprising a recombinant host cell comprising an engineered butanol biosynthetic pathway. In some embodiments, the engineered butanol biosynthetic pathway may be a 1-butanol biosynthetic pathway, 2-butanol biosynthetic pathway, isobutanol biosynthetic pathway, or 2-butanone biosynthetic pathway. In some embodiments, the recombinant host cell of the composition is a member of the genus Saccharomyces, Schizosaccharomyces, Hansenula, Candida, Kluyveromyces, Yarrowia, Issatchenkia, or Pichia. In some embodiments, the recombinant host cell of the composition is Saccharomyces cerevisiae. In some embodiments, the recombinant host cell comprises an engineered enzyme which catalyzed the substrate to product conversion acetolactate to 2,3-dihydroxyisovalerate.

[0338] In some embodiments, enzymes from the biosynthetic pathway may be localized to the cytosol. In some embodiments, enzymes from the biosynthetic pathway that are usually localized to the mitochondria may be localized to the cytosol. In some embodiments, an enzyme from the biosynthetic pathway may be localized to the cytosol by removing the mitochondrial targeting sequence. In some embodiments, mitochondrial targeting may be eliminated by generating new start codons as described in, for example, U.S. Pat. No. 7,851,188, which is incorporated herein by reference in its entirety. In some embodiments, the enzyme from the biosynthetic pathway that is localized to the cytosol is DHAD. In some embodiments, the enzyme from the biosynthetic pathway that is localized to the cytosol is KARI.

[0339] In some embodiments, the recombinant host cell is contacted with carbon substrates under conditions whereby butanol is produced. In some embodiments, butanol may be 1-butanol, 2-butanol, isobutanol, or 2-butanone. In some embodiments, the recombinant host cell at a given cell density may be added to a fermentation vessel along with suitable media. In some embodiments, the media may contain the carbon substrate, or the carbon substrate may be added separately. In some embodiments, the carbon substrate may be present at any concentration at the start of and/or during production of butanol. In some embodiments, the initial concentration of carbon substrate may be in the range of about 60 to about 80 g/L. Suitable temperatures for fermentation are known to those of skill in the art and will depend on the genus and/or species of the recombinant host cell employed. In some embodiments, suitable temperatures are in the range of 25° C. to 43° C. The contact between the recombinant host cell and the carbon substrate may be any length of time whereby butanol is produced. In some embodiments, the contact occurs for at least about 8 hours, at least about 24 hours, or at least about 48 hours. In some embodiments, the contact occurs for less than about 8 hours. In some embodiments, the contact may occur until at least about 90% of the carbon substrate (e.g., sucrose) is utilized or until a desired effective titer of butanol is reached. In some embodiments when isobutanol is produced, the effective titer of isobutanol is at least about 40 g/L, at least about 50 g/L, at least about 60 g/L, at least about 70 g/L, at least about 80 g/L, at least about 90 g/L, at least about 100 g/L, or at least about 110 g/L.

[0340] In some embodiments, after the desired butanol production, the recombinant host cell is collected. The collection may be carried out by any method known in the art, including, for example, centrifugation. In some embodiments, the collected recombinant host cell may be recycled. In some embodiments, the collected recombinant host cell may be conducted to a fermentation vessel.

[0341] In some embodiments, the recombinant host cell produces butanol at least about 90% of effective yield, at least about 91% of effective yield, at least about 92% of effective yield, at least about 93% of effective yield, at least about 94% of effective yield, at least about 95% of effective yield, at least about 96% of effective yield, at least about 97% of effective yield, at least about 98% of effective yield, or at least about 99% of effective yield. In some embodiments, the recombinant host cell may produce butanol at least about 55% to at least about 75% of effective yield, at least about 50% to at least about 80% of effective yield, at least about 45% to at least about 85% of effective yield, at least about 40% to at least about 90% of effective yield, at least about 35% to at least about 95% of effective yield, at least about 30% to at least about 99% of effective yield, at least about 25% to at least about 99% of effective yield, at least about 10% to at least about 99% of effective yield, or at least about 10% to at least about 100% of effective yield.

### Butanologens

[0342] In some embodiments, the recombinant host cell may be a butanolgen. In some embodiments, the butanologen may be an isobutanologen. In some embodiments, the recombinant host cell may be E. coli or L. plantarum. In some embodiments, suitable isobutanologens include any yeast host useful for genetic modification and recombinant gene expression. In some embodiments, the isobutanologen host cell may be a member of the genera Schizosaccharomyces, Issatchenkia, Kluyveromyces, Yarrowia, Pichia, Candida, Hansenula, or Saccharomyces. In some embodiments, the host cell may be Saccharomyces cerevisiae, Schizosaccharomyces pombe, Kluyveromyces lactis, Kluyveromyces thermotolerans, Kluyveromyces marxianus, Candida glabrata, Candida albicans, Pichia stipitis, or Yarrowia lipolytica. In some embodiments, the host cell may be a yeast host cell. In some embodiments, the host cell is a member of the genera Saccharomyces. In some embodiments, the host cell may be Kluyveromyces lactis, Candida glabrata or Schizosaccharomyces pombe. Saccharomyces cerevisiae yeast are known in the art and are available from a variety of sources, including, but not limited to, American Type Culture Collection (Rockville, Md.), Centraalbureau voor Schimmelcultures (CBS) Fungal Biodiversity Centre, LeSaffre, Gert Strand AB, Ferm Solutions, North American Bioproducts, Martrex, and Lallemand. Saccharomyces cerevisiae include, but are not limited to, BY4741, CEN.PK 113-7D, Ethanol Red® yeast, Ferm Pro™ yeast, Bio-Ferm® XR yeast, Gert Strand Prestige Batch Turbo alcohol yeast, Gert Strand Pot Distillers yeast, Gert Strand Distillers Turbo yeast, FerMax™ Green yeast, FerMax™ Gold yeast, Thermosacc® yeast, BG-1, PE-2, CAT-1, CBS7959, CBS7960, and CBS7961.

[0343] “PNY860” refers to a strain derived from Saccharomyces cerevisiae which has been deposited under the Budapest Treaty on Jul. 21, 2011 at the American Type Culture Collection, Patent Depository 10801 University Boulevard, Manassas, Va. 20110-2209 and has the patent deposit designation PTA-12007.

[0344] In some embodiments, the isobutanologen may be a derivative of PNY860. In some embodiments, the butanologen may be a haploid derivative of strain PNY860. In some embodiments, the butanologen may be a non-sporulating derivative of PNY860. In some embodiments, the butanologen may be a non-mating derivative of PNY860.

[0345] In some embodiments, the butanologen expresses an engineered butanol biosynthetic pathway. In some embodiments, the butanologen is an isobutanologen expressing an engineered isobutanol biosynthetic pathway. In some embodiments, the butanologen expresses an engineered 1-butanol biosynthetic pathway. In some embodiments, the butanologen expresses an engineered 2-butanol biosynthetic pathway. In some embodiments, the butanologen expresses an engineered 2-butanone biosynthetic pathway.

### Carbon Substrates

[0346] Suitable carbon substrates may include, but are not limited to, monosaccharides such as fructose or glucose; oligosaccharides such as lactose, maltose, galactose, or sucrose; polysaccharides such as starch or cellulose; and mixtures thereof, and unpurified mixtures from renewable feedstocks such as cheese whey permeate, cornsteep liquor, sugar beet molasses, and barley malt. Other carbon substrates may include ethanol, lactate, succinate, or glycerol.

[0347] “Sugar” includes monosaccharides such as fructose or glucose; oligosaccharides such as lactose, maltose, galactose, or sucrose; polysaccharides such as starch or cellulose; C5 sugars such as xylose and arabinose; and mixtures thereof.

[0348] Additionally, the carbon substrate may also be one-carbon substrates such as carbon dioxide or methanol for which metabolic conversion into key biochemical intermediates has been demonstrated. In addition to one and two carbon substrates, methylotrophic organisms are also known to utilize a number of other carbon containing compounds such as methylamine, glucosamine, and a variety of amino acids for metabolic activity. For example, methylotrophic yeasts are known to utilize the carbon from methylamine to form trehalose or glycerol (Bellion, et al., Microb. Growth Cl Compd., [Int. Symp.], 7th (1993), 415-32, Editor(s): Murrell, J. Collin; Kelly, Don P. Publisher: Intercept, Andover, UK). Similarly, various species of Candida will metabolize alanine or oleic acid (Sulter, et al., Arch. Microbiol. 153:485-489, 1990). Hence, it is contemplated that the source of carbon utilized in the present invention may encompass a wide variety of carbon containing substrates and will only be limited by the choice of organism.

[0349] Although it is contemplated that the carbon substrates described herein and mixtures thereof are suitable in the present invention, in some embodiments, the carbon substrates may be glucose, fructose, and sucrose, or mixtures of these with C5 sugars such as xylose and arabinose for yeasts cells modified to use C5 sugars. Sucrose may be derived from renewable sugar sources such as sugar cane, sugar beets, cassava, sweet sorghum, and mixtures thereof. Glucose and dextrose may be derived from renewable grain sources through saccharification of starch based feedstocks including grains such as corn, wheat, rye, barley, oats, and mixtures thereof. In addition, fermentable sugars may be derived from renewable cellulosic or lignocellulosic biomass through processes of pretreatment and saccharification, as described, for example, in U.S. Patent Application Publication No. 2007/0031918, the entire contents of which are herein incorporated by reference. Biomass includes materials comprising cellulose, and optionally further comprising hemicellulose, lignin, starch, oligosaccharides, and/or monosaccharides. Biomass may also comprise additional components such as protein and/or lipid. Biomass may be derived from a single source or biomass may comprise a mixture derived from more than one source; for example, biomass may comprise a mixture of corn cobs and corn stover, or a mixture of grass and leaves. Biomass includes, but is not limited to, bioenergy crops, agricultural residues, municipal solid waste, industrial solid waste, sludge from paper manufacture, yard waste, wood and forestry waste. Examples of biomass include, but are not limited to, corn grain, corn cobs, crop residues such as corn husks, corn stover, grasses, wheat, wheat straw, barley, barley straw, hay, rice straw, switchgrass, waste paper, sugar cane bagasse, sorghum, soy, components obtained from milling of grains, trees, branches, roots, leaves, wood chips, sawdust, shrubs and bushes, vegetables, fruits, flowers, animal manure, and mixtures thereof.

[0350] In some embodiments, the carbon substrate may be glucose derived from corn. In some embodiments, the carbon substrate may be glucose derived from wheat. In some embodiments, the carbon substrate may be sucrose derived from sugar cane.

[0351] In addition to an appropriate carbon source, fermentation media may contain suitable minerals, salts, cofactors, buffers, and other components, known to those skilled in the art, suitable for the growth of the cultures and promotion of an enzymatic pathway described herein.

### Fermentation Conditions

[0352] Typically, cells are grown at a temperature in the range of about 20° C. to about 40° C. in an appropriate medium. Suitable growth media in the present invention include common commercially prepared media such as Sabouraud Dextrose (SD) broth, Yeast Medium (YM) broth, or broth that includes yeast nitrogen base, ammonium sulfate, and dextrose (as the carbon/energy source) or YPD Medium, a blend of peptone, yeast extract, and dextrose in optimal proportions for growing most Saccharomyces cerevisiae strains. Other defined or synthetic growth media may also be used, and the appropriate medium for growth of the particular microorganism will be known by one skilled in the art of microbiology or fermentation science. The use of agents known to modulate catabolite repression directly or indirectly, for example, cyclic adenosine 2′:3′-monophosphate, may also be incorporated into the fermentation medium.

[0353] Suitable pH ranges for the fermentation may be from about pH 5.0 to about pH 9.0. In some embodiments, about pH 6.0 to about pH 8.0 may be used for the initial condition. Suitable pH ranges for the fermentation of yeast are typically from about pH 3.0 to about pH 9.0. In some embodiments, about pH 5.0 to about pH 8.0 may be used for the initial condition. Suitable pH ranges for the fermentation of other microorganisms are from about pH 3.0 to about pH 7.5. In some embodiments, about pH 4.5 to about pH 6.5 may be used for the initial condition.

[0354] Fermentations may be performed under aerobic or anaerobic conditions. In some embodiments, anaerobic or microaerobic conditions are used for fermentations.

### Industrial Batch and Continuous Fermentations

[0355] Isobutanol, or other products, may be produced using a batch method of fermentation. A classical batch fermentation is a closed system where the composition of the medium is set at the beginning of the fermentation and not subject to artificial alterations during the fermentation. A variation on the standard batch system is the fed-batch system. Fed-batch fermentation processes are also suitable in the present invention and comprise a typical batch system with the exception that the substrate is added in increments as the fermentation progresses. Fed-batch systems are useful when catabolite repression is apt to inhibit the metabolism of the cells and where it is desirable to have limited amounts of substrate in the media. Batch and fed-batch fermentations are common and well known in the art and examples may be found in Thomas D. Brock in Biotechnology: A Textbook of Industrial Microbiology, Second Edition (1989) Sinauer Associates, Inc., Sunderland, Mass., or Deshpande, Appl. Biochem. Biotechnol. 36:227, 1992.

[0356] Isobutanol, or other products, may also be produced using continuous fermentation methods. Continuous fermentation is an open system where a defined fermentation medium is added continuously to a bioreactor and an equal amount of conditioned media is removed simultaneously for processing. Continuous fermentation generally maintains the cultures at a constant high density where cells are primarily in log phase growth. Continuous fermentation allows for the modulation of one factor or any number of factors that affect cell growth or end product concentration. Methods of modulating nutrients and growth factors for continuous fermentation processes as well as techniques for maximizing the rate of product formation are well known in the art of industrial microbiology and a variety of methods are detailed by Brock, supra.

[0357] It is contemplated that the production of isobutanol, or other products, may be practiced using batch, fed-batch, or continuous processes and that any known mode of fermentation would be suitable. Additionally, it is contemplated that cells may be immobilized on a substrate as whole cell catalysts and subjected to fermentation conditions for isobutanol production.

Methods for Isobutanol Isolation from the Fermentation Medium

[0358] Bioproduced isobutanol may be isolated from the fermentation medium using methods known in the art, for example, ABE fermentations (see, e.g., Durre, Appl. Microbiol. Biotechnol. 49:639-648, 1998, Groot, et al., Process. Biochem. 27:61-75, 1992, and references therein). For example, solids may be removed from the fermentation medium by centrifugation, filtration, decantation, or the like (see, e.g., U.S. Patent Application Publication No. 2012/0164302, the entire contents of which are herein incorporated by reference). Isobutanol may be isolated from the fermentation medium using methods such as distillation, azeotropic distillation, liquid-liquid extraction, adsorption, gas stripping, membrane evaporation, or pervaporation.

[0359] Because isobutanol forms a low boiling point, azeotropic mixture with water, distillation may be used to separate the mixture up to its azeotropic composition. Distillation may be used in combination with another separation method to obtain separation of the azeotrope. Methods that may be used in combination with distillation to isolate and purify isobutanol include, but are not limited to, decantation, liquid-liquid extraction, adsorption, and membrane-based techniques. Additionally, isobutanol may be isolated using azeotropic distillation using an entrainer (see, e.g., Doherty and Malone, Conceptual Design of Distillation Systems, McGraw Hill, N.Y., 2001).

[0360] The isobutanol-water mixture forms a heterogeneous azeotrope so that distillation may be used in combination with decantation to isolate and purify isobutanol. In this method, isobutanol-containing fermentation broth is distilled to near the azeotropic composition. Then, the azeotropic mixture is condensed, and isobutanol is separated from the fermentation medium by decantation. The decanted aqueous phase may be returned to the first distillation column as reflux. The isobutanol-rich decanted organic phase may be further purified by distillation in a second distillation column. Examples of distillation methods are described in U.S. Patent Application Publication No. 2011/0162953, U.S. Patent Application Publication No. 2011/0162954; U.S. Patent Application Publication No. 2011/0288345; and U.S. Patent Application Publication No. 2011/0288344; the entire contents of which are herein incorporated by reference.

[0361] Isobutanol may also be isolated from the fermentation medium using liquid-liquid extraction in combination with distillation. In this method, isobutanol is extracted from the fermentation broth using liquid-liquid extraction with a suitable solvent. The isobutanol-containing organic phase is then distilled to separate isobutanol from the solvent.

[0362] Distillation in combination with adsorption may also be used to isolate isobutanol from the fermentation medium. In this method, the fermentation broth containing isobutanol is distilled to near the azeotropic composition and then the remaining water is removed by use of an adsorbent, such as molecular sieves (Aden, et al., Lignocellulosic Biomass to Ethanol Process Design and Economics Utilizing Co-Current Dilute Acid Prehydrolysis and Enzymatic Hydrolysis for Corn Stover, Report NREL/TP-510-32438, National Renewable Energy Laboratory, June 2002).

[0363] Additionally, distillation in combination with pervaporation may be used to isolate and purify isobutanol from the fermentation medium. In this method, the fermentation broth containing isobutanol is distilled to near the azeotropic composition, and then the remaining water is removed by pervaporation through a hydrophilic membrane (Guo, et al., J. Membr. Sci. 245:199-210, 2004).

[0364] In situ product removal (ISPR) (also referred to as extractive fermentation) may be used to remove isobutanol (or other fermentative alcohol) from the fermentation vessel as it is produced, thereby allowing the microorganism to produce isobutanol at high yields. One method for ISPR for removing fermentative alcohol that has been described in the art is liquid-liquid extraction. In general, with regard to isobutanol fermentation, for example, the fermentation medium, which includes the microorganism, is contacted with an organic extractant at a time before the isobutanol concentration reaches a toxic level. The organic extractant and the fermentation medium form a biphasic mixture. Isobutanol partitions into the organic extractant phase, decreasing the concentration in the aqueous phase containing the microorganism, thereby limiting the exposure of the microorganism to the inhibitory isobutanol.

[0365] Liquid-liquid extraction may be performed, for example, according to the processes described in U.S. Patent Application Publication No. 2009/0305370, the disclosure of which is hereby incorporated in its entirety. U.S. Patent Application Publication No. 2009/0305370 describes methods for producing and recovering isobutanol from a fermentation broth using liquid-liquid extraction, the methods comprising the step of contacting the fermentation broth with a water immiscible extractant to form a two-phase mixture comprising an aqueous phase and an organic phase. Typically, the extractant may be an organic extractant selected from the group consisting of saturated, mono-unsaturated, poly-unsaturated (and mixtures thereof) C₁₂ to C₂₂ fatty alcohols, C₁₂ to C₂₂ fatty acids, esters of C₁₂ to C₂₂ fatty acids, C₁₂ to C₂₂ fatty aldehydes, and mixtures thereof. The extractant(s) for ISPR may be non-alcohol extractants. The ISPR extractant may be an exogenous organic extractant such as oleyl alcohol, behenyl alcohol, cetyl alcohol, lauryl alcohol, myristyl alcohol, stearyl alcohol, alkyl alkanols, 1-undecanol, oleic acid, lauric acid, myristic acid, stearic acid, methyl myristate, methyl oleate, undecanal, lauric aldehyde, 20-methylundecanal, trioctyl phosphine oxide, and mixtures thereof.

[0366] In some embodiments, an ester may be formed by contacting the alcohol in a fermentation medium with an organic acid (e.g., fatty acids) and a catalyst capable of esterifying the alcohol with the organic acid. In some embodiments, the organic acid may serve as an ISPR extractant into which the alcohol esters partition. The organic acid may be supplied to the fermentation vessel and/or derived from the biomass supplying fermentable carbon fed to the fermentation vessel. Lipids present in the feedstock may be catalytically hydrolyzed to organic acid, and the same catalyst (e.g., enzymes) can esterify the organic acid with the alcohol. The catalyst may be supplied to the feedstock prior to fermentation, or may be supplied to the fermentation vessel before or contemporaneously with the supplying of the feedstock. When the catalyst is supplied to the fermentation vessel, alcohol esters may be obtained by hydrolysis of the lipids into organic acid and substantially simultaneous esterification of the organic acid with isobutanol present in the fermentation vessel. Organic acid and/or native oil not derived from the feedstock may also be fed to the fermentation vessel, with the native oil being hydrolyzed into organic acid. Any organic acid not esterified with the alcohol may serve as part of the ISPR extractant. The extractant containing alcohol esters may be separated from the fermentation medium, and the alcohol can be recovered from the extractant. The extractant may be recycled to the fermentation vessel. Thus, in the case of isobutanol production, for example, the conversion of isobutanol to an ester reduces the free isobutanol concentration in the fermentation medium, shielding the microorganism from the toxic effect of increasing isobutanol concentration. In addition, unfractionated grain may be used as feedstock without separation of lipids therein, since the lipids can be catalytically hydrolyzed to organic acid, thereby decreasing the rate of build-up of lipids in the ISPR extractant. Other isobutanol product recovery and/or ISPR methods may be employed, including those described in U.S. Patent Application Publication No. 2009/0305370; U.S. Patent Application Publication No. 2011/0097773; U.S. Patent Application Publication No. 2012/0156738; the entire contents of which are herein incorporated by reference.

[0367] In situ product removal may be carried out in a batch mode or a continuous mode. In a continuous mode of in situ product removal, product is continually removed from the reactor. In a batchwise mode of in situ product removal, a volume of organic extractant is added to the fermentation vessel and the extractant is not removed during the process. For in situ product removal, the organic extractant may contact the fermentation medium at the start of the fermentation forming a biphasic fermentation medium. Alternatively, the organic extractant may contact the fermentation medium after the microorganism has achieved a desired amount of growth, which may be determined by measuring the optical density of the culture. Further, the organic extractant may contact the fermentation medium at a time at which the product level in the fermentation medium reaches a preselected level. In the case of isobutanol production according to some embodiments of the present invention, the organic acid extractant may contact the fermentation medium at a time before the isobutanol concentration reaches a toxic level, so as to esterify isobutanol with the organic acid to produce isobutanol esters and consequently reduce the concentration of isobutanol in the fermentation vessel. The ester-containing organic phase may then be removed from the fermentation vessel (and separated from the fermentation broth which constitutes the aqueous phase) after a desired effective titer of the isobutanol esters is achieved. In some embodiments, the ester-containing organic phase is separated from the aqueous phase after fermentation of the available fermentable sugar in the fermentation vessel is substantially complete.

[0368] Isobutanol titer in any phase may be determined by methods known in the art, such as via high performance liquid chromatography (HPLC) or gas chromatography, as described, for example in U.S. Patent Application Publication No. 2009/0305370, which is incorporated herein by reference.

### EXAMPLES

[0369] The present invention is further defined in the following Examples. It should be understood that these Examples, while indicating embodiments of the invention, are given by way of illustration only. From the description herein and these Examples, one skilled in the art can ascertain the essential characteristics of this invention, and without departing from the spirit and scope thereof, can make various changes and modifications of the invention to adapt it to various uses and conditions.

### General Methods

[0370] Standard recombinant DNA and molecular cloning techniques used in the Examples are well known in the art and are described by Sambrook, et al. (Sambrook, J., Fritsch, E. F. and Maniatis, T., Molecular Cloning: A Laboratory Manual; Cold Spring Harbor Laboratory Press, Cold Spring Harbor, 1989) and by Ausubel, et al. (Ausubel, et al., Current Protocols in Molecular Biology, pub. by Greene Publishing Assoc. and Wiley-Interscience, 1987).

[0371] Materials and methods suitable for the maintenance and growth of bacterial cultures are well known in the art. Techniques suitable for use in the following examples may be found as set out in Manual of Methods for General Bacteriology (Phillipp, et al., eds., American Society for Microbiology, Washington, D.C., 1994) or by Thomas D. Brock in (Brock, Biotechnology: A Textbook of Industrial Microbiology, Second Edition, Sinauer Associates, Inc., Sunderland, Mass., 1989). All reagents, restriction enzymes, and materials used for the growth and maintenance of bacterial cells were obtained from Sigma-Aldrich Chemicals (St. Louis, Mo.), BD Diagnostic Systems (Sparks, Md.), Invitrogen (Carlsbad, Calif.), HiMedia (Mumbai, India), SD Fine chemicals (India), or Takara Bio Inc. (Shiga, Japan), unless otherwise specified. Yeast strains and vectors were obtained from American Type Culture Collection (ATCC).

[0372] The meaning of abbreviations is as follows: “sec” means second(s), “min” means minute(s), “h” means hour(s), “nm” means nanometers, “uL” means microliter(s), “mL” means milliliter(s), “mg/mL” means milligram per milliliter, “L” means liter(s), “nm” means nanometers, “mM” means millimolar, “M” means molar, “mmol” means millimole(s), “μmole” means micromole(s), “kg” means kilogram, “g” means gram(s), “μg” means microgram(s) “ng” means nanogram(s), “PCR” means polymerase chain reaction, “ORF” means open reading frame, “OD” means optical density, “OD₆₀₀” means the optical density measured at a wavelength of 600 nm, “kDa” means kilodaltons, “g” can also mean the gravitation constant, “bp” means base pair(s), “kbp” means kilobase pair(s), “kb” means kilobase, “%” means percent, “% w/v” means weight/volume percent, “% v/v” means volume/volume percent, “HPLC” means high performance liquid chromatography, “g/L” means gram per liter, “μg/L” means microgram per liter, “ng/μL” means nanogram per microliter, “μmol/μL” means picomol per microliter, “rpm” means rotation per minute, “μmol/min/mg” means micromole per minute per milligram, “w/v” means weight per volume, “v/v” means volume per volume, and “CFU/mL” means colony-forming units per milliliter.

### Example 1

### Construction of a Randomly Mutated Library of YAP1 Gene

[0373] The Saccharomyces cerevisiae strain BY4741 (ATCC® No. 201388™; MATa his3Δ leu2Δ met15Δ ura3Δ) was used as a DNA template. An error-prone PCR (epPCR) library was made as following:

Amplification of Wild-Type YAP1 from Genomic DNA of Saccharomyces cerevisiae BY4741

[0374] Genomic DNA of Saccharomyces cerevisiae strain BY4741 (uracil and histidine auxotroph) was prepared from an overnight grown culture using Gentra® Puregene® Yeast/Bact. kit (Qiagen, Valencia, Calif.). The genomic DNA was used to amplify the ORF of YAP1 gene (SEQ ID NO: 2) using Phusion® High Fidelity PCR Master Mix (New England BioLabs Inc.; Ipswich, Mass.) using primers YAP1-F-XbaI-EcoRI and YAP-R-XhoI (SEQ ID NOs: 167 and 168). The PCR product was purified using QIAquick® PCR Purification Kit (Qiagen, Valencia, Calif.).

Error-Prone PCR (epPCR)

[0375] Approximately 0.1-0.5 mg purified PCR products were used as template for generating epPCR products with GeneMorph® II Random Mutagenesis Kit (Stratagene Corporation, La Jolla, Calif.). PCR was performed for 20-22 cycles in multiple tubes; epPCR products were purified using QIAquick® PCR Purification Kit (Qiagen, Valencia, Calif.).

Construction of Randomly Mutated YAP1 Library in p416 TEF Shuttle Vector

[0376] Purified epPCR products were restricted using XbaI and XhoI restriction enzymes (New England BioLabs Inc.; Ipswich, Mass.), purified using QIAquick® PCR Purification Kit (Qiagen, Valencia, Calif.), and cloned into linear p416 TEF vector (ATCC® No. 87368™) (SEQ ID NO: 169). Purified epPCR product (100-200 μg), 100-150 μg of vector, and ligation buffer containing 5 units of T4 DNA ligase (Promega, Madison, Wis.) were combined, and the reaction mix was incubated overnight at 16° C. and transformed into E. coli CB5α (Chromas Biotech, Bangalore, India) competent cells. Transformants were selected on Luria-Bartani (LB) agar plates containing 100 μg/mL ampicillin. A total of 10⁷ numbers of E. coli colonies were pooled for plasmid isolation.

Construction of YAP1 Yeast Library Using Saccharomyces cerevisiae BY4741

[0377] Plasmids were extracted from transformants using QIAGEN® Plasmid Mini Kit (Qiagen, Valencia, Calif.) generating a plasmid library. The purified plasmid library was then transformed into Saccharomyces cerevisiae BY4741 competent cells using Frozen-EZ Yeast Transformation II Kit™ (Zymo Research Corporation, Irvine, Calif.). Yeast transformants were selected in uracil-deficient minimal medium (1× yeast nitrogen base without amino acids; 80 mg/L each of leucine, histidine, and methionine amino acid mix without uracil, 20 g/L glucose as carbon source) after 48-72 hours of incubation at 30° C. Cells were recovered from plates by washing using the same uracil-deficient minimal medium and preserved as glycerol stock at −80° C. for further use. A total of 10⁸ numbers of colonies were pooled and preserved as “YAP1-mut yeast library.”

### Example 2

### Screening of Isobutanol Tolerant Clones in BY4741:YAP1-Mut Colonies

[0378] The YAP1-mut yeast library was screened for isobutanol tolerant strains. The library was suspended in uracil-deficient minimal medium (1× yeast nitrogen base without amino acid; 80 mg/L each of leucine, histidine, and methionine amino acid mix without uracil, 20 g/L glucose as carbon source) containing either 20 or 24 g/L isobutanol in flasks. The flasks were agitated at 150 rpm and at 30° C. Every 24 h, the cultures were diluted 1:1 using fresh uracil-deficient minimal medium containing 20 or 24 g/L isobutanol. After 4 repeated transfers/dilutions in 20 or 24 g/L isobutanol containing media, the culture was plated on uracil-deficient agar plates containing 20 or 24 g/L isobutanol. Single colonies that appeared after 72-96 h of incubation were suspended in 96-well deep well plates (same medium without isobutanol) which served as the master plate for subsequent analysis. After 24 h of incubation, 0.01 mL of each culture from the 96-well master plates was inoculated into minimal medium containing either 20 or 24 g/L isobutanol in 96-well test plates. Test plates were incubated at 30° C. After 24 h or 48 h of incubation, 5 μL culture from test plates were spotted on uracil-deficient agar plates without isobutanol. Colonies that survived 24 or 48 h exposure in 20 or 24 g/L isobutanol were purified on agar plates containing isobutanol and processed further for identification of mutations in the YAP1 ORF cloned in shuttle vector p416 TEF (SEQ ID NO: 169). For this purpose, plasmids were isolated from selected yeast clones using Zymoprep™ Yeast Plasmid Miniprep Kit (Zymo Research Corporation, Irvine, Calif.) and transformed into E. coli CB5α strain. Transformants were selected and purified on LB agar plates containing 100 μg/L ampicillin. Plasmids extracted from purified E. coli clones were restricted using XbaI and XhoI to verify the presence of insert, and sequenced using primers p416 Forward (SEQ ID NO: 170), p416 Reverse (SEQ ID NO: 171), YAP1306F (SEQ ID NO: 172), YAP1769R (SEQ ID NO: 173), YAP1961F (SEQ ID NO: 174), YAP11368R (SEQ ID NO: 175), YAP1488R (SEQ ID NO: 176), and YAP11647R (SEQ ID NO: 177).

[0379] The sequences were aligned using Vector NTI® software (Life Technologies Corporation, Grand Island, N.Y.) and were subjected to multiple sequence alignments using ALIGNX tool of Vector NTI® software. Ten variants of the YAP1 gene (“YAP1 variants”) were identified. The number of nucleotide and amino acid changes of each variant are shown in Table 8, and the amino acid changes are shown in Table 9. The position of amino acid changes are presented as numbers corresponding to the wild-type Yap1. Only the position of the amino acid variation corresponding to wild-type (numbers) Yap1 is shown.

TABLE 8

| | Number of | Number of |
|---|---|---|
| Variant | Nucleotides Changed | Amino Acids Changed |
| B5-1 | 3 | 2 |
| B5-4 | 5 | 3 |
| B8-1 | 1 | 1 |
| B8-4 | 2 | 2 |
| C5-2 | 8 | 4 |
| C5-3 | 5 | 3 |
| D8-1 | 1 | 0 |
| D8-4 | 1 | 1 |
| E5-4 | 5 | 3 |
| F8-1 | 5 | 3 |

TABLE 9

| YAP1 | Location of amino acid changes of YAP1 WT ORF | | | | | | | | | | | | | | | | | | |
|---|---|---|---|---|---|---|---|---|---|---|---|---|---|---|---|---|---|---|---|
| variants | 80 | 132 | 168 | 237 | 254 | 257 | 297 | 302 | 367 | 404 | 411 | 444 | 487 | 498 | 499 | 548 | 584 | 617 | 636 |
| B5-1 | . | . | . | . | V | . | . | . | . | A | . | . | . | . | . | . | . | . | . |
| B5-4 | V | G | . | . | . | . | . | . | . | . | . | C | . | . | . | . | . | . | . |
| B8-1 | . | . | G | . | . | . | . | . | . | . | . | . | . | . | . | . | . | . | . |
| B8-4 | . | . | . | . | . | . | . | . | . | . | . | . | K | . | . | . | . | N | . |
| C5-2 | . | . | . | F | . | . | K | . | I | . | . | . | . | . | L | . | . | . | . |
| C5-3 | . | . | . | . | . | . | . | . | . | . | S | . | . | . | . | . | G | . | V |
| D8-1 | . | . | . | . | . | . | . | . | . | . | . | . | . | . | . | . | . | . | . |
| D8-4 | . | . | . | . | . | S | . | . | . | . | . | . | . | . | . | . | . | . | . |
| E5-4 | . | . | . | . | . | . | . | L | . | . | . | . | . | T | . | R | . | . | . |
| F8-1 | . | . | . | . | . | . | . | L | . | . | . | . | . | T | . | R | . | . | . |
| Wild-type | A | R | D | L | M | L | E | F | T | T | N | G | E | M | F | K | D | D | I |

[0380] Alignments of nucleotide sequences of wild-type and YAP1 variants showed 1-8 nucleotide point mutations in the YAP1 variants, resulting in 0-4 amino acids changes in the coding region of the Yap1. YAP1 variants E5-4 and F8-1 (SEQ ID NOs: 20 and 27) have similar mutations in YAP1 ORF. YAP1 variants D8-1 (SEQ ID NO: 178) has a single nucleotide substitution; however, there was no change in the amino acid sequence (silent mutation). The YAP1 variants C5-2 (SEQ ID NO: 23) has 8 nucleotide substitutions in YAP1 gene. The majority of the clones that showed isobutanol tolerance have more than 2 mutations in YAP1 gene ORF.

### Example 3

### Glucose Assimilation Test

[0381] Cells of Saccharomyces cerevisiae BY4741 transformed with plasmid p416-TEF (vector control), plasmid overexpressing wild-type YAP1 gene, or YAP1 variants cloned in p416-TEF (Table 5) were used in this study. Cells were grown in uracil-deficient medium (1× yeast nitrogen base without amino acid; 80 mg/l each of leucine, histidine, and methionine amino acid mix without uracil, 20 g/L glucose as carbon source) and suspended to OD=10 in the same medium containing 22 g/L isobutanol. The cultures were grown for 24 h at 30° C. with agitation at 220 rpm. Residual glucose content of culture supernatant was measured at 0 h and 24 h using HPLC, and glucose consumed was calculated as the difference between the residual glucose in the culture at 0 h and 24 hr (Δ of residual glucose of 0 and 24 h). Results are shown in Table 10. Data shown is glucose consumption (g/L) and is average of three independent replicates.

TABLE 10

| Controls | | Variants of YAP1 gene overexpressed in Saccharomyces cerevisiae BY4741* | | | | | | | | | |
|---|---|---|---|---|---|---|---|---|---|---|---|
| p416 vector | WT YAP1 | B5-1 | C5-2 | B8-4 | C5-3 | E5-4 | B8-1 | D8-1 | D8-4 | F8-1 | B5-4 |
| 2.5 | 3 | 3 | 4.5 | 3 | 4.5 | 4 | 1 | 5 | 4 | 4 | 1 |

*Data shown is glucose consumption (g/L)

[0382] Cells overexpressing YAP1 variants such as C5-2 (SEQ ID NO: 23), C5-3 (SEQ ID NO: 24), D8-4 (SEQ ID NO: 25), E5-4 (SEQ ID NO: 26), and F8-1(SEQ ID NO: 27) consumed more glucose compared to controls (Table 10). Yeast cells overexpressing YAP1 variants B5-1 (SEQ ID NO: 19), B8-1 (SEQ ID NO: 21), B8-4 (SEQ ID NO: 22), and B5-4 (SEQ ID NO: 20) consumed either less or equal amount of glucose as compared to wild-type YAP1. Since the wild-type YAP1 gene was not knocked out in the YAP1 variants, YAP1 variants were expressing the wild-type chromosomal YAP1 and overexpressing mutated YAP1 from plasmid.

### Example 4

### Isobutanol Tolerance

[0383] Cells of Saccharomyces cerevisiae BY4741 expressing wild-type YAP1 or YAP1 variants were grown in uracil-deficient medium (1× yeast nitrogen base without amino acid; 80 mg/L each of leucine, histidine, and methionine amino acid mix without uracil, 20 g/L glucose as carbon source) at 30° C. for 18 h at 200 rpm. The cells were diluted to 2-5×10⁷ CFU/mL and suspended in the same medium containing 25 g/L isobutanol. Cultures were incubated at 30° C. for 24 h with agitation at 200 rpm. Viable cell count (expressed as log₁₀ number) was performed at 0 h and 24 h of incubation in isobutanol-containing medium, and reduction of viable cell count (log₁₀) was calculated and expressed as percentage of viability. Results are shown in Table 11.

TABLE 11

| | Controls | | Variants of YAP1 Gene Overexpressed in Saccharomyces cerevisiae BY4741 | | | | | | | | | |
|---|---|---|---|---|---|---|---|---|---|---|---|---|
| CFU*/mL (log₁₀) | p416 vector | WT YAP1 | B5-1 | C5-2 | B8-4 | C5-3 | E5-4 | B8-1 | D8-1 | D8-4 | F8-1 | B5-4 |
| Log₁₀ cells | 7.6 | 7.3 | 7.7 | 7.3 | 7.0 | 7.5 | 7.5 | 7.0 | 7.5 | 7.6 | 7.7 | 7.7 |
| at 0 h | | | | | | | | | | | | |
| Log₁₀ cells | 3.3 | 4.6 | 4.6 | 5.0 | 3.3 | 5.6 | 4.0 | 4.5 | 4.0 | 5.3 | 4.3 | 4.6 |
| at 24 h | | | | | | | | | | | | |
| % cell viability | 43.4 | 63.0 | 59.8 | 68.5 | 47 | 75 | 53.5 | 64 | 53.5 | 69.7 | 56 | 60 |

[0384] Cells overexpressing YAP1 variants E5-4, F8-1, D8-1, C5-2, C5-3, D8-4, B5-1, B8-1, B8-4, and B5-4 showed improved cell viability in 25 g/L isobutanol. Cells overexpressing YAP1 variants C5-2, C5-3, and D8-4 showed 68-74% viability in 25 g/L isobutanol, whereas the cell viability of the vector control was 43% (Table 11). Thus, overexpression of wild-type YAP1 and YAP1 variants improved cell viability in isobutanol by 10-31% over vector control.

### Example 5

### Construction of Strains for Isobutanol Production

[0385] The haploid strains (PNY891 MATa and PNY0894 MATα) were chosen as a host for isobutanol production. Gene deletion and integration were performed in the haploid strains to create a strain background suitable for isobutanol production. Chromosomal gene deletion was performed by homologous recombination with a PCR cassette containing homology upstream and downstream of the target gene, and either a G-418 resistance marker or URA3 gene for selection of transformants. For gene integration, the gene to be integrated was included in the PCR cassette. The selective marker recycle was achieved using either the Crelox system or a scarless deletion method (Akada, et al., Yeast 23: 399, 2006).

[0386] First, gene deletion (URA3, HIS3, PDC6, and PDC1) and integration (ilvD into the PDC1 site) were performed in the PNY891 MATa to generate PNY1703 (=MATa ura3Δ::loxP his3Δ::loxP pdc6Δ pdc1Δ::ilvD). Second, PNY1703 was mated with PNY0894 MATα to make a diploid. The resulting diploid was sporulated and then tetrad-dissected, and spore segregants were screened for growth phenotype on glucose and ethanol media, and genotype carrying ura3Δ::loxP his3Δ::loxP pdc6Δ pdc1Δ::ilvD. Two mating type haploids, PNY1713 (=MATα ura3Δ::loxP his3Δ::loxP pdc6Δ pdc1Δ::ilvD) and PNY1714 (=MATa ura3Δ::loxP his3Δ::loxP pdc6Δ pdc1Δ::ilvD) were isolated. Third, gene deletion (PDC5, FRA2, GPD2, BDH1, and YMR226c) and integration (kivD, ilvD, alsS, and ilvD-adh into the PDC5, FRA2, GPD2, and BDH1 sites, respectively) were performed in the PNY1714 strain background to construct PNY1758 (=MATa ura3Δ::loxP his3Δ::loxP pdc6Δ pdc1Δ::ilvD pdc5Δ::kivD(y)fra2Δ::UAS(PGK1)-FBA1p-ilvD(y)gpd2Δ::loxP71/66-FBA1p-alsS bdh1Δ::UAS(PGK1)-ENO2p-ilvD-ILV5p-adh ymr226cΔ).

### URA3 Deletion

[0387] To delete the endogenous URA3 coding region, a deletion cassette was PCR-amplified from pLA54 (SEQ ID NO: 179) which contains a TEF1p-kanMX-TEF1t cassette flanked by loxP sites to allow homologous recombination in vivo and subsequent removal of the KanMX marker. PCR was performed using Phusion® DNA polymerase (New England BioLabs Inc., Ipswich, Mass.) and primers BK505 (SEQ ID NO: 180) and BK506 (SEQ ID NO: 181). The URA3 portion of each primer was derived from the 5′ region 180 bp upstream of the URA3 ATG and 3′ region 78 bp downstream of the coding region such that integration of the KanMX cassette results in replacement of the URA3 coding region. The PCR product was transformed into PNY891, a haploid strain, using standard genetic techniques (Methods in Yeast Genetics, 2005, Cold Spring Harbor Laboratory Press, Cold Spring Harbor, N.Y., pp. 201-202) and transformants were selected on rich media supplemented with 2% glucose and G-418 (Geneticin®, 100 μg/mL) at 30° C. Transformants were patched onto rich media supplemented with 2% glucose and replica plated onto synthetic complete media lacking uracil and supplemented with 2% glucose to identify uracil auxotrophs. These patches were screened by colony PCR with primers LA468 (SEQ ID NO: 182) and LA492 (SEQ ID NO: 183) to verify presence of the integration cassette. A URA3 mutant was obtained; NYLA96 (=MATa ura3Δ::loxP-kanMX-loxP).

### HIS3 Deletion

[0388] To delete the endogenous HIS3 coding region, a deletion cassette was PCR-amplified from pLA33 (SEQ ID NO: 184) which contains a URA3p-URA3-URA3t cassette flanked by loxP sites to allow homologous recombination in vivo and subsequent removal of the URA3 marker. PCR was performed using Phusion® DNA polymerase (New England BioLabs Inc., Ipswich, Mass.) and primers 315 (SEQ ID NO: 185) and 316 (SEQ ID NO: 186). The HIS3 portion of each primer was derived from the 5′ region 50 bp upstream of the HIS3 ATG and 3′ region 50 bp downstream of the coding region such that integration of the URA3 cassette results in replacement of the HIS3 coding region. The PCR product was transformed into NYLA96 using standard genetic techniques (Methods in Yeast Genetics, 2005, Cold Spring Harbor Laboratory Press, Cold Spring Harbor, N.Y., pp. 201-202) with selection on synthetic complete media lacking uracil supplemented with 2% glucose at 30° C. Transformants were screened by colony PCR with primers 92 (SEQ ID NO: 187) and 346 (SEQ ID NO: 188) to verify presence of the integration cassette. The URA3 marker was recycled by transforming with pRS423::GAL1p-cre (SEQ ID NO: 189) and plated on synthetic complete media lacking histidine and supplemented with 2% glucose at 30° C. Transformants were plated on yeast extract+peptone (YP) agar plate supplemented with 0.5% galactose to induce expression of Cre recombinase. Marker removal was confirmed by patching colonies to synthetic complete media lacking uracil and supplemented with 2% glucose to verify absence of growth. Also, marker removal of the KanMX cassette, used to delete URA3, was confirmed by patching colonies to rich media supplemented with 2% glucose and G-418 (Geneticin®, 100 μg/mL) at 30° C. to verify absence of growth. The resulting URA3 and HIS3 deletion strain was named NYLA107 (=MATa ura3Δ::loxP his3Δ::loxP).

### PDC6 Deletion

[0389] Saccharomyces cerevisiae has three PDC genes (PDC1, PDC5, PDC6), encoding three different isozymes of pyruvate decarboxylase. Pyruvate decarboxylase catalyzes the first step in ethanol fermentation, producing acetaldehyde from the pyruvate generated in glycolysis.

[0390] The PDC6 coding sequence was deleted by homologous recombination with a PCR cassette (A-B-U-C) containing homology upstream (fragment A) and downstream (fragment B) of the PDC6 coding region, a URA3 gene along with the promoter (250 bp upstream of the URA3 gene) and terminator (150 bp downstream of the URA3 gene) (fragment U) for selection of transformants, and the 3′ region of the PDC6 coding region (fragment C), according to a scarless deletion method (Akada, et al., Yeast 23: 399, 2006). The four fragments (A, B, U, C) for the PCR cassette for the scarless PDC6 deletion were amplified from PNY891 genomic DNA as template using Phusion® High Fidelity PCR Master Mix (New England BioLabs Inc.; Ipswich, Mass.). PNY891 genomic DNA was prepared with a Gentra® Puregene® Yeast/Bact. kit (Qiagen, Valencia, Calif.). PDC6 Fragment A was amplified with primer oBP440 (SEQ ID NO: 190) and primer oBP441 (SEQ ID NO: 191), containing a 3′ tail with homology to the 5′ end of PDC6 Fragment B. PDC6 Fragment B was amplified with primer oBP442 (SEQ ID NO: 192), containing a 5′ tail with homology to the 3′ end of PDC6 Fragment A, and primer oBP443 (SEQ ID NO: 193), containing a 5′ tail with homology to the 5′ end of PDC6 Fragment U. PDC6 Fragment U was amplified with primer oBP444 (SEQ ID NO: 194), containing a 5′ tail with homology to the 3′ end of PDC6 Fragment B, and primer oBP445 (SEQ ID NO: 195), containing a 5′ tail with homology to the 5′ end of PDC6 Fragment C. PDC6 Fragment C was amplified with primer oBP446 (SEQ ID NO: 196), containing a 5′ tail with homology to the 3′ end of PDC6 Fragment U, and primer oBP447 (SEQ ID NO: 197). PCR products were purified with a PCR purification kit (Qiagen, Valencia, Calif.). PDC6 Fragment A-B was created by overlapping PCR by mixing PDC6 Fragment A and PDC6 Fragment B and amplifying with primers oBP440 (SEQ ID NO: 190) and oBP443 (SEQ ID NO: 193). PDC6 Fragment U-C was created by overlapping PCR by mixing PDC6 Fragment U and PDC6 Fragment C and amplifying with primers oBP444 (SEQ ID NO: 194) and oBP447 (SEQ ID NO: 197). The resulting PCR products were gel-purified on an agarose gel followed by a gel extraction kit (Qiagen, Valencia, Calif.). The PDC6 A-B-U-C cassette was created by overlapping PCR by mixing PDC6 Fragment A-B and PDC6 Fragment U-C and amplifying with primers oBP440 (SEQ ID NO: 190) and oBP447 (SEQ ID NO: 197). The PCR product was purified with a PCR purification kit (Qiagen, Valencia, Calif.).

[0391] Competent cells of NYLA107 were made and transformed with the PDC6 A-B-U-C PCR cassette using a Frozen-EZ Yeast Transformation II™ kit (Zymo Research Corporation, Irvine, Calif.). Transformation mixtures were plated on synthetic complete media lacking uracil supplemented with 2% glucose at 30° C. Transformants with a pdc6 knockout were screened for by PCR with primers oBP448 (SEQ ID NO: 198) and oBP449 (SEQ ID NO: 199) using genomic DNA prepared with a Gentra® Puregene® Yeast/Bact. kit (Qiagen, Valencia, Calif.). To remove the URA3 marker from the chromosome, a correct transformant was grown overnight in YPD and plated on synthetic complete medium containing 5-fluoro-orotic acid (0.1%) at 30° C. to select for isolates that lost the URA3 marker. The deletion and marker removal were confirmed by PCR and sequencing with primers oBP448 (SEQ ID NO: 198) and oBP449 (SEQ ID NO: 199) using genomic DNA prepared with a Gentra® Puregene® Yeast/Bact. kit (Qiagen, Valencia, Calif.). The absence of the PDC6 gene from the isolate was demonstrated by a negative PCR result using primers specific for the coding sequence of PDC6, oBP554 (SEQ ID NO: 200) and oBP555 (SEQ ID NO: 201). The correct isolate was selected as strain PNY1702 (=MATa ura3Δ::loxP his3Δ::loxP pdc6Δ).

PDC1 Deletion and ilvD Integration

[0392] The PDC1 coding region was deleted and replaced with the ilvD coding region from Streptococcus mutans ATCC® No. 700610™ by homologous recombination with a PCR cassette (A-ilvD-B-U-C) containing homology upstream (fragment A) and downstream (fragment B) of the PDC1 coding region, the ilvD coding region (fragment ilvD), a URA3 gene along with the promoter and terminator (fragment U) for selection of transformants, and the 3′ region of the PDC1 coding region (fragment C). The A fragment followed by the ilvD coding region from Streptococcus mutans for the PCR cassette for the PDC1 deletion-ilvD integration was amplified using Phusion® High Fidelity PCR Master Mix (New England BioLabs Inc.; Ipswich, Mass.) and NYLA83 (described in U.S. Patent Application Publication No. 2011/0312043, the entire contents of which are herein incorporated by reference) genomic DNA as template, prepared with a Gentra® Puregene® Yeast/Bact. kit (Qiagen, Valencia, Calif.). PDC1 Fragment A-ilvD was amplified with primer oBP513 (SEQ ID NO: 202) and primer oBP515 (SEQ ID NO: 203), containing a 5′ tail with homology to the 5′ end of PDC1 Fragment B. The B, U, and C fragments for the PCR cassette for the PDC1 deletion-ilvD integration were amplified using Phusion® High Fidelity PCR Master Mix (New England BioLabs Inc.; Ipswich, Mass.) and PNY891 genomic DNA as template, prepared with a Gentra® Puregene® Yeast/Bact. kit (Qiagen, Valencia, Calif.). PDC1 Fragment B was amplified with primer oBP516 (SEQ ID NO: 204), containing a 5′ tail with homology to the 3′ end of PDC1 Fragment A-ilvD, and primer oBP517 (SEQ ID NO: 205), containing a 5′ tail with homology to the 5′ end of PDC1 Fragment U. PDC1 Fragment U was amplified with primer oBP518 (SEQ ID NO: 206), containing a 5′ tail with homology to the 3′ end of PDC1 Fragment B, and primer oBP519 (SEQ ID NO: 207), containing a 5′ tail with homology to the 5′ end of PDC1 Fragment C. The PDC1 Fragment C was amplified with primer oBP520 (SEQ ID NO: 208), containing a 5′ tail with homology to the 3′ end of PDC1 Fragment U, and primer oBP521 (SEQ ID NO: 209). PCR products were purified with a PCR purification kit (Qiagen, Valencia, Calif.). PDC1 Fragment A-ilvD-B was created by overlapping PCR by mixing PDC1 Fragment A-ilvD and PDC1 Fragment B and amplifying with primers oBP513 and oBP517. PDC1 Fragment U-C was created by overlapping PCR by mixing PDC1 Fragment U and PDC1 Fragment C and amplifying with primers oBP518 (SEQ ID NO: 206) and oBP521 (SEQ ID NO: 209). The resulting PCR products were gel-purified on an agarose gel followed by a gel extraction kit (Qiagen, Valencia, Calif.). The PDC1 A-ilvD-B-U-C cassette was created by overlapping PCR by mixing PDC1 Fragment A-ilvD-B and PDC1 Fragment U-C and amplifying with primers oBP513 (SEQ ID NO: 202) and oBP521 (SEQ ID NO: 209). The PCR product was purified with a PCR purification kit (Qiagen, Valencia, Calif.).

[0393] Competent cells of PNY1702 were made and transformed with the PDC1 A-ilvD-B-U-C PCR cassette using a Frozen-EZ Yeast Transformation II™ kit (Zymo Research Corporation, Irvine, Calif.). Transformation mixtures were plated on synthetic complete media lacking uracil supplemented with 2% glucose at 30C. Transformants with a pdc1 knockout ilvD integration were screened for by PCR with primers oBP511 (SEQ ID NO: 210) and oBP512 (SEQ ID NO: 211) using genomic DNA prepared with a Gentra® Puregene® Yeast/Bact. kit (Qiagen, Valencia, Calif.). The absence of the PDC1 gene from the isolate was demonstrated by a negative PCR result using primers specific for the coding sequence of PDC1, oBP550 (SEQ ID NO: 212) and oBP551 (SEQ ID NO: 213). To remove the URA3 marker from the chromosome, a correct transformant was grown overnight in YPD and plated on synthetic complete medium containing 5-fluoro-orotic acid (0.1%) at 30° C. to select for isolates that lost the URA3 marker. The deletion of PDC1, integration of ilvD, and marker removal were confirmed by PCR with primers ilvDSm(1354F) (SEQ ID NO: 214) and oBP512 (SEQ ID NO: 211) and sequencing with primers ilvDSm(788R) (SEQ ID NO: 215) and ilvDSm(1354F) (SEQ ID NO: 214) using genomic DNA prepared with a Gentra® Puregene® Yeast/Bact. kit (Qiagen, Valencia, Calif.). The correct isolate was selected as strain PNY1703 (=MATa ura3Δ::loxP his3Δ::loxP pdc6Δ pdc1Δ::ilvD).

[0394] PNY1703 MATa×PNY0894 MATα mating, sporulation, and tetrad dissection to isolate PNY1713 (=MATα ura3Δ::loxP his3Δ::loxP pdc6Δ pdc1Δ::ilvD) and PNY1714 (=MATa ura3Δ::loxP his3Δ::loxP pdc6Δ pdc1Δ::ilvD)

[0395] Diploid (MATa/α) cells were created by crossing PNY1703 MATa and PNY0894 MATα on YPD at 30° C. overnight. Potential diploids were streaked onto an YPD plate and incubated at 30° C. for 4 days to isolate single colonies. To identify diploid, colony PCR (Huxley, et al., Trends Genet. 6:236, 1990) was carried out using Phusion® High Fidelity PCR Master Mix (New England BioLabs Inc.; Ipswich, Mass.) with three oligonucleotide primers, MAT1 (SEQ ID NO: 216) corresponding to a sequence at the right of and directed toward the MAT locus, MAT2 (SEQ ID NO: 217) corresponding to a sequence within the α-specific region located at MATα and HMLα, and MAT3 (SEQ ID NO: 218) corresponding to a sequence within the a-specific region located at MATa and HMRa. Diploid colonies were determined by yielding two PCR products, MATα-specific 404 bp and MATa-specific 544 bp. The resulting diploids were grown in pre-sporulation medium and then inoculated into sporulation medium (Codon, et al., Appl. Environ. Microbiol. 61:630, 1995). After 3 days, the sporulation efficiency was checked by microscope. Spores were digested with 0.05 mg/mL Zymolyase® (Zymo Research Corporation, Irvine, Calif.; using the procedure from Methods in Yeast Genetics, 2000, Cold Spring Harbor Laboratory Press, Cold Spring Harbor, N.Y.). Eight (8) plates of tetrads were dissected (18 tetrads per plate, totaling 144 tetrads, 576 spores) on YPD plates and placed at 30° C. for 4 days. To screen the spore progeny for genotype ura3Δ and his3Δ and growth phenotype on ethanol and glucose media, the spores on YPD plates were sequentially replica plated to 1) the synthetic complete (SC) media lacking uracil (ura) supplemented with 2% glucose, 2) SC lacking histidine (his) supplemented with 2% glucose, and then 3) SC supplemented with 0.5% ethanol media using a yeast replica plating apparatus (Corastyles, Hendersonville, N.C.). Spores that failed to grow on SC-ura and SC-his plates, but grew on SC+0.5% ethanol and YPD plates were selected and PCR-analyzed to determine their mating-type (Huxley, et al., Trends Genet. 6:236, 1990). To determine if the spores contain pdc1Δ::ilvD, the selected spores were checked by colony PCR using primers oBP512 (SEQ ID NO: 211) and ilvDSm(1354F) (SEQ ID NO: 214). Spores containing pdc1Δ::ilvD produce an expected PCR product of 962 bp, but those without the deletion produce no PCR product. The positive spores were then PCR-checked for the deletion of PDC6 using primers oBP448 (SEQ ID NO: 198) and oBP449 (SEQ ID NO: 199). The expected PCR sizes of the fragments were 1.3 kbp for cells containing the pdc64 and 2.9 kbp for cells containing the wild-type PDC6 gene. The correct isolates were selected for both mating types, and designated as PNY1713 (=MATα ura3Δ::loxP his3Δ::loxP pdc6Δ pdc1Δ::ilvD) and PNY1714 (=MATa ura3Δ::loxP his3Δ::loxP pdc6Δ pdc1Δ::ilvD).

PDC5 Deletion and kivD(y) Integration

[0396] The PDC5 coding region was deleted and replaced with the kivD coding region from Lactococcus lactis by homologous recombination with a PCR cassette (A-kivD(y)-B-U-C) containing homology upstream (fragment A) and downstream (fragment B) of the PDC5 coding region, the kivD(y) coding region (fragment kivD(y)), codon optimized for expression in Saccharomyces cerevisiae, a URA3 gene along with the promoter and terminator (fragment U) for selection of transformants, and the 3′ region of the PDC5 coding region (fragment C).

[0397] PDC5 Fragment A was amplified from PNY891 genomic DNA as template using Phusion® High Fidelity PCR Master Mix (New England BioLabs Inc.; Ipswich, Mass.) with primer T-A(PDC5) (SEQ ID NO: 219) and primer B-A(kivD) (SEQ ID NO: 220), containing a 3′ tail with homology to the 5′ end of kivD(y). The coding sequence of kivD(y) was amplified from (SEQ ID NO: 221) as template with primer T-kivD(A) (SEQ ID NO: 222), containing a 5′ tail with homology to the 3′ end of PDC5 Fragment A, and primer B-kivD(B) (SEQ ID NO: 223), containing a 3′ tail with homology to the 5′ end of PDC5 Fragment B. PDC5 Fragment A-kivD(y) was created by overlapping PCR by mixing PDC5 Fragment A and kivD(y) and amplifying with primers T-A(PDC5) and B-A(kivD). PDC5 Fragment B was cloned into pUC19-URA3MCS to create the B-U portion of the PDC5 A-kivD(y)-B-U-C PCR cassette. The resulting plasmid was designated as pUC19-URA3-sadB-PDC5fragmentB (SEQ ID NO: 224). A plasmid pUC19-URA3-sadB-PDC5fragmentB was used as a template for amplification of PDC5 Fragment B-Fragment U using primers T-B(kivD) (SEQ ID NO: 225), containing a 5′ tail with homology to the 3′ end of kivD(y) Fragment, and oBP546 (SEQ ID NO: 226), containing a 3′ tail with homology to the 5′ end of PDC5 Fragment C. PDC5 Fragment C was amplified with primer oBP547 (SEQ ID NO: 227), containing a 5′ tail with homology to the 3′ end of PDC5 Fragment B-Fragment U, and primer oBP539 (SEQ ID NO: 228). PCR products were purified with a PCR purification kit (Qiagen, Valencia, Calif.). PDC5 Fragment B-Fragment U-Fragment C was created by overlapping PCR by mixing PDC5 Fragment B-Fragment U and PDC5 Fragment C and amplifying with primers T-B(kivD) (SEQ ID NO: 225) and oBP539 (SEQ ID NO: 228). The resulting PCR product was purified on an agarose gel followed by a gel extraction kit (Qiagen, Valencia, Calif.). The PDC5 A-kivD(y)-B-U-C cassette was created by overlapping PCR by mixing PDC5 Fragment A-kivD(y) Fragment and PDC5 Fragment B-Fragment U-PDC5 Fragment C and amplifying with primers T-A(PDC5) (SEQ ID NO: 219) and oBP539 (SEQ ID NO: 228). The PCR product was purified with a PCR purification kit (Qiagen, Valencia, Calif.).

[0398] Competent cells of PNY1714 were made and transformed with the PDC5 A-kivD(y)-B-U-C PCR cassette using a Frozen-EZ Yeast Transformation II™ kit (Zymo Research Corporation, Irvine, Calif.). Transformation mixtures were plated on synthetic complete media lacking uracil supplemented with 0.5% ethanol (no glucose) at 30° C. Transformants with a pdc5 knockout kivD integration were screened for by PCR with primers oBP540 (SEQ ID NO: 229) and kivD(652R) (SEQ ID NO: 230) using genomic DNA prepared with a Gentra® Puregene® Yeast/Bact. kit (Qiagen, Valencia, Calif.). The absence of the PDC5 gene from the isolate was demonstrated by a negative PCR result using primers specific for the coding sequence of PDC5, oBP552 (SEQ ID NO: 231) and oBP553 (SEQ ID NO: 232). To remove the URA3 marker from the chromosome, each correct transformant of both MATα and MATa strains was grown overnight in YPE (0.5% ethanol) and plated on synthetic complete medium supplemented with ethanol (no glucose) and containing 5-fluoro-orotic acid (0.1%) at 30° C. to select for isolates that lost the URA3 marker. The deletion of PDC5, integration of kivD(y), and marker removal were confirmed by PCR with primers oBP540 and oBP541 using genomic DNA prepared with a Gentra® Puregene® Yeast/Bact. kit (Qiagen, Valencia, Calif.). The correct integration of the kivD(y) coding region was confirmed by DNA sequence with primers, kivD(652R) (SEQ ID NO: 230), kivD(602F) (SEQ ID NO: 233), and kivD(1250F) (SEQ ID NO: 234). The correct isolates were designated as strain PNY1716 (=MATa ura3Δ::loxP his3Δ::loxP pdc6Δ pdc1Δ::ilvD pdc5Δ::kivD(y)).

FRA2 Deletion and UAS(PGK1)-FBA1p-ilvD(y)-TEF1t Integration

[0399] The FRA2 coding region was deleted and replaced with a cassette UAS(PGK1)-FAB1p-ilvD(y)-TEF1t-HisG-URA3-HisG by homologous recombination. The cassette UAS(PGK1)-FAB1p-ilvD(y)-TEF1t-HisG-URA3-HisG contains the hybrid promoter UAS(PGK1)-FAB1p, ilvD(y) coding region from Streptococcus mutans ATCC® No. 700610™, codon optimized for expression in Saccharomyces cerevisiae, TEF1t terminator, and URA3 gene along with the promoter and terminator, flanked by HisG fragments.

[0400] A plasmid pRS423-TPI1p-ilvD(y) (SEQ ID NO: 235) was digested with restriction enzymes NotI and SalI, and the 2,270 bp TPI1p-ilvD(y) fragment was purified on an agarose gel followed by a gel extraction kit (Qiagen, Valencia, Calif.). TPI1p-ilvD(y) fragment was cloned into NotI and SalI sites on pMOD-URA3r2 (SEQ ID NO: 236) to construct pMOD-URA3r2-TPI1p-ilvD(y). pMOD-URA3r2 is pUC19 based and contains the sequence of the URA3 gene flanked by HisG fragments. PCR TEF1t (285 bp) was amplified from Saccharomyces cerevisiae genomic DNA as template using Phusion® High Fidelity PCR Master Mix (New England BioLabs Inc.; Ipswich, Mass.) with primer T-TEF1t(NotI) (SEQ ID NO: 237) and primer B-TEF1t(NotI) (SEQ ID NO: 238). PCR TEF1t fragment was digested with a restriction enzyme NotI and then cloned into a NotI site on pMOD-URA3r2-TPI1p-ilvD(y). The correct orientation of TEF1t was confirmed by colony PCR analysis with T-DSmo(RPS5p) (SEQ ID NO: 239) and B-TEF1t(NotI) (SEQ ID NO: 238) with 2,009 bp of expected size. The resulting plasmid was designated as pMOD-URA3r2-TPI1p-ilvD(y)-TEF1t. Then, the TPI1p promoter on pMOD-URA3r2-TPI1p-ilvD(y)-TEF1t was replaced with the hybrid promoter UAS(PGK1)-FBA1p (SEQ ID NO: 240). PCR UAS(PGK1)-FBA1p cassette was amplified from a plasmid pRS316-UAS(PGK1)-FBA1p-GUS (SEQ ID NO: 241) using Phusion® High Fidelity PCR Master Mix (New England BioLabs Inc.; Ipswich, Mass.) with primer T-U/PGK1(XhoApa) (SEQ ID NO: 242) and primer B-FBA1(SpeI) (SEQ ID NO: 243). PCR UAS(PGK1)-FBA1p product was digested with restriction enzymes XhoI and SpeI, and the PCR fragment was purified on an agarose gel followed by a gel extraction kit (Qiagen, Valencia, Calif.). pMOD-URA3r2-TPI1p-ilvD(y)-TEF1t was digested with restriction enzymes SalI and SpeI, and then 6,887 bp plasmid fragment lacking TPI1p was purified on an agarose gel followed by a gel extraction kit (Qiagen, Valencia, Calif.). The 6,887 bp pMOD-URA3r2-ilvD(y)-TEF1t was ligated with UAS(PGK1)-FBA1p product digested with XhoI and SpeI to create pMOD-URA3r2-UAS(PGK1)-FBA1p-ilvD(y)-TEF1t (SEQ ID NO: 244). PCR cassette UAS(PGK1)-FAB1p-ilvD(y)-TEF1t-HisG-URA3-HisG was amplified from a plasmid pMOD-URA3r2-UAS(PGK1)-FBA1p-ilvD(y)-TEF1t using Phusion® High Fidelity PCR Master Mix (New England BioLabs Inc.; Ipswich, Mass.) with primers T-FRA(Dsm) (SEQ ID NO: 245), containing the 5′ region 50 bp upstream of the FRA2 ATG, and B-FRA(Dsm) (SEQ ID NO: 246), containing the 3′ region 50 bp downstream of the FRA2 coding region. The PCR product was purified with a PCR purification kit (Qiagen, Valencia, Calif.).

[0401] Competent cells of PNY1716 were made and transformed with the PCR cassette UAS(PGK1)-FAB1p-ilvD(y)-TEF1t-HisG-URA3-HisG using a Frozen-EZ Yeast Transformation II™ kit (Zymo Research Corporation, Irvine, Calif.). Transformation mixtures were plated on synthetic complete media lacking uracil supplemented with 0.5% ethanol (no glucose) at 30° C. Transformants with a fra2 knockout UAS(PGK1)-FAB1p-ilvD(y)-TEF1t-HisG-URA3-HisG integration were screened for by PCR with primers oBP602 (SEQ ID NO: 247) and B-TEF1t(NotI) using genomic DNA prepared with a Gentra® Puregene® Yeast/Bact. kit (Qiagen, Valencia, Calif.). To remove the URA3 marker from the chromosome, correct transformants were grown overnight in YPE (0.5% ethanol) and plated on synthetic complete medium supplemented with ethanol (no glucose) and containing 5-fluoro-orotic acid (0.1%) at 30° C. to select for isolates that lost the URA3 marker. The deletion of FRA2, integration of UAS(PGK1)-FAB1p-ilvD(y)-TEF1t, and URA3 marker removal were confirmed by DNA sequencing with primers DSm(o)50R (SEQ ID NO: 248), DSm(o)1F (SEQ ID NO: 249), DSm(o)688F (SEQ ID NO: 250), and DSm(o)1352F (SEQ ID NO: 251) using genomic DNA prepared with a Gentra® Puregene® Yeast/Bact. kit (Qiagen, Valencia, Calif.). The correct isolates were designated as strain PNY1720 (=MATa ura3Δ::loxP his3Δ::loxP pdc6Δ pdc1Δ::ilvD pdc5Δ::kivD(y) fra2Δ::UAS(PGK1)-FBA1p-ilvD(y)).

GPD2 Deletion and FBA1p-alsS Integration

[0402] The GPD2 coding region was deleted and replaced with the FAB1 promoter and alsS coding region coding region by homologous recombination with a PCR cassette (URA3-FBA1p-alsS) containing the URA3p-URA3-URA3t cassette flanked by the degenerated loxP71/loxP66 sites, FBA1 promoter from Saccharomyces cerevisiae, and alsS from Bacillus subtilis subsp. subtilis str. 168 (NC_{—}000964).

[0403] PCR URA3p-URA3-URA3t fragment flanked by loxP71/loxP66 sites was amplified from pLA59 (SEQ ID NO: 252) using Phusion® DNA polymerase (New England BioLabs Inc., Ipswich, Mass.) with primers T-URA(gpd_{—}60 bp) (SEQ ID NO: 253), containing the 5′ region 60 bp upstream of the GPD2 ATG, and B-URA(alsS) (SEQ ID NO: 254), containing a 3′ tail with homology to the 5′ end of the FBA1p-alsS fragment. PCR FBA1p-alsS fragment was amplified from pUC19-kan::pdc1::FBA-alsS::TRX1 (SEQ ID NO: 255) using Phusion® DNA polymerase (New England BioLabs Inc., Ipswich, Mass.) with primers T-alsS(URA) (SEQ ID NO: 256), containing a 5′ tail with homology to the 3′ end of the URA3p-URA3-URA3t fragment, and B-alsS(gpd_{—}60 bp) (SEQ ID NO: 257), containing the 3′ region 60 bp downstream of the GPD2 gene. The resulting PCR product was purified on an agarose gel followed by a gel extraction kit (Qiagen, Valencia, Calif.). The URA3-FBA1p-alsS cassette was created by overlapping PCR by mixing URA3p-URA3-URA3t fragment and FBA1p-alsS fragment and amplifying with primers T-URA(gpd_{—}60 bp) and B-alsS(gpd_{—}60 bp). The PCR product was purified with a PCR purification kit (Qiagen, Valencia, Calif.).

[0404] Competent cells of PNY1720 were made and transformed with the PCR cassette URA3-FBA1p-alsS using a Frozen-EZ Yeast Transformation II™ kit (Zymo Research Corporation, Irvine, Calif.). Transformation mixtures were plated on synthetic complete media lacking uracil supplemented with 0.5% ethanol (no glucose) at 30° C. Transformants with a gpd2 knockout URA3-FBA1p-alsS integration were screened for by PCR with primers FBA-als1557 (SEQ ID NO: 258) and gpd2-down178 (SEQ ID NO: 259) using genomic DNA prepared with a Gentra® Puregene® Yeast/Bact. kit (Qiagen, Valencia, Calif.). The URA3 marker was recycled by transformation with pRS423::P_{GAL1}-cre (SEQ ID NO: 260) and plating on synthetic complete media lacking histidine supplemented with 0.5% ethanol at 30° C. Transformants were streaked on synthetic complete medium supplemented with 0.5% ethanol and containing 5-fluoro-orotic acid (0.1%) and incubated at 30° C. to select for isolates that lost the URA3 marker. 5-FOA resistant isolates were grown in YPE (0.5% ethanol) for removal of the pRS423::P_{GAL1}-cre plasmid. The GPD2 deletion, FBA1p-alsS integration, and marker removal were checked by PCR with primers gpd2-up229 (SEQ ID NO: 261) and B-FBA1(SpeI) (SEQ ID NO: 243), and confirmed by DNA sequencing with primers T-alsS(URA) (SEQ ID NO: 256), FBA-als752 (SEQ ID NO: 262), FBA-als1557 (SEQ ID NO: 258), and gpd2-down178 (SEQ ID NO: 259) using genomic DNA prepared with a Gentra® Puregene® Yeast/Bact. kit (Qiagen, Valencia, Calif.). The correct isolates were designated as strains PNY1725 (=MATa ura3Δ::loxP his3Δ::loxP pdc6Δ pdc1Δ::ilvD pdc5Δ::kivD(y) fra2Δ::UAS(PGK1)-FBA1p-ilvD(y) gpd2Δ::loxP71/66-FBA1p-alsS).

BDH1 Deletion and UAS(PGK1)-ENO2p-ilvD-TEF1t-ILV5p-adh Integration

[0405] The BDH1 coding region was deleted and replaced with a cassette UAS(PGK1)-ENO2p-ilvD-TEF1t-ILV5p-adh by homologous recombination. The BDH1 deletion and UAS(PGK1)-ENO2p-ilvD-TEF1t-ILV5p-adh integration cassette (A-UAS(PGK1)-ENO2p-ilvD-TEF1t-ILV5p-adh-B-U-C) contains the homology upstream (fragment A) and downstream (fragment B) of the BDH1 coding region, hybrid promoter UAS(PGK1)-ENO2p, ilvD coding region from Streptococcus mutans ATCC® No. 700610™, TEF1t terminator, ILV5p promoter, adh coding region along with the terminator from Beijerinckia indica, and a URA3 gene along with the promoter and terminator (fragment U) for selection of transformants, and the 3′ region of the BDH1 coding region (fragment C). The fragment A, UAS(PGK1)-ENO2p, ilvD, TEF1t, ILV5p, adh, fragment B, fragment U and fragment C were cloned into pUC19 based plasmid to create pBP1339 (=pA-UAS(PGK1)-ENO2p-ilvD-TEF1t-ILV5p-adh-B-U-C) (SEQ ID NO: 263). PCR cassette A-UAS(PGK1)-ENO2p-ilvD-TEF1t-ILV5p-adh-B-U-C was amplified from pBP1339 using Phusion® DNA polymerase (New England BioLabs Inc., Ipswich, Mass.) with primers oBP685 (SEQ ID NO: 264) and oBP690 (SEQ ID NO: 265). The PCR product was purified with a PCR purification kit (Qiagen, Valencia, Calif.).

[0406] Competent cells of PNY1725 were made and transformed with the PCR cassette A-UAS(PGK1)-ENO2p-ilvD-TEF1t-ILV5p-adh-B-U-C using a Frozen-EZ Yeast Transformation II™ kit (Zymo Research Corporation, Irvine, Calif.). Transformation mixtures were plated on synthetic complete media lacking uracil supplemented with 0.5% ethanol (no glucose) at 30° C. Transformants with a bdhI knockout UAS(PGK1)-ENO2p-ilvD-TEF1t-ILV5p-adh-B-U integration were screened for by PCR with primers oBP726 (SEQ ID NO: 266) and DSm1354F (SEQ ID NO: 267) using genomic DNA prepared with a Gentra® Puregene® Yeast/Bact. kit (Qiagen, Valencia, Calif.). To remove the URA3 marker from the chromosome, correct transformants were grown overnight in YPE (0.5% ethanol) and plated on synthetic complete medium supplemented with ethanol (no glucose) and containing 5-fluoro-orotic acid (0.1%) at 30° C. to select for isolates that lost the URA3 marker. The deletion of BDH1, integration of UAS(PGK1)-ENO2p-ilvD-TEF1t-ILV5p-adh, and URA3 marker removal were confirmed by DNA sequencing with primers DSm788R (SEQ ID NO: 268), DSm696F (SEQ ID NO: 269), DSm1354F (SEQ ID NO: 267), ADHBi643R (SEQ ID NO: 270), and ADHBi554F (SEQ ID NO: 271) using genomic DNA prepared with a Gentra® Puregene® Yeast/Bact. kit (Qiagen, Valencia, Calif.). The correct isolates were designated as strains PNY1730 (=MATa ura3Δ::loxP his3Δ::loxP pdc6Δ pdc1Δ::ilvD pdc5Δ::kivD (y) fra2Δ::UAS(PGK1)-FBA1p-ilvD(y)-gpd2Δ::loxP71/66-FBA1p-alsS bdh1Δ::UAS(PGK1)-ENO2p-ilvD-ILV5p-adh).

### YMR226c Deletion

[0407] The gene YMR226c was deleted in strain PNY1730 by homologous recombination using a PCR amplified 2.0 kb linear scarless deletion cassette. The cassette was constructed from spliced PCR amplified fragments comprised of the URA3 gene, along with its native promoter and terminator as a selectable marker, upstream and downstream homology sequences flanking the YMR226c gene chromosomal locus to promote integration of the deletion cassette and removal of the native intervening sequence and a repeat sequence to promote recombination and removal of the URA3 marker. The 1,208 bp URA3 expression cassette was PCR-amplified from pLA33 (SEQ ID NO: 184) with forward and reverse PCR primers N1251 (SEQ ID NO: 272) and N1252 (SEQ ID NO: 273). Forward and reverse primers N1253 (SEQ ID NO: 274) and N1254 (SEQ ID NO: 275) amplified a 250 bp downstream homology sequence with a 3′ URA3 overlap sequence tag from a genomic DNA preparation of S. cerevisiae strain PNY2211 (MATa ura3Δ::loxP his3A pdc6Δ pdc1Δ::P[PDC1]-DHAD|ilvD_Sm-PDC1t-P[FBA1]-ALS|alsS_Bs-CYC1t pdc5Δ::P[PDC5]-ADH|sadB_Ax-PDC5t gpd2Δ::loxP fra2Δ adh1Δ::UAS(PGK1)P[FBA1]-kivD_L1(y)-ADH1t). Forward and reverse PCR primers N1256 (SEQ ID NO: 276) and N1255 (SEQ ID NO: 277) amplified a 250 bp repeat sequence with a 5′ URA3 overlap sequence tag from a genomic DNA preparation of Saccharomyces cerevisiae strain PNY2211. Forward and reverse PCR primers N1257 (SEQ ID NO: 278) and N1258 (SEQ ID NO: 279) amplified a 250 bp upstream homology sequence with a 5′ repeat overlap sequence tag from a genomic DNA preparation of Saccharomyces cerevisiae strain PNY2211.

[0408] Approximately 1.5 μg of the PCR amplified cassette was transformed into strain PNY1730 made competent using the Frozen-EZ Yeast Transformation II™ kit (Zymo Research Corporation, Irvine, Calif.) and the transformation mix plated on the synthetic complete media lacking uracil supplemented with 0.5% ethanol (no glucose) at 30° C. for selection of cells with an integrated ymr226cΔ:: URA3 cassette. Transformants appearing after 72 to 96 hours are subsequently short-streaked on the same medium and incubated at 30° C. for 24 to 48 hours. The short-streaks are screened for ymr226cΔ::URA3 by PCR, with a 5′ outward facing URA3 deletion cassette-specific internal primer N1249 (SEQ ID NO: 280) paired with a flanking inward facing chromosome-specific primer N1239 (SEQ ID NO: 281) and a 3′ outward-facing URA3 deletion cassette-specific primer N1250 (SEQ ID NO: 282) paired with a flanking inward-facing chromosome-specific primer N1242 (SEQ ID NO: 283). A positive PNY1730 ymr226cΔ:: URA3 PCR screen resulted in 5′ and 3′ PCR products of 598 and 726 bp, respectively.

[0409] The positive PNY1730 ymr226cΔ:: URA3 clones were cultured overnight in a YPE (0.5% ethanol) and then was plated on synthetic complete medium supplemented with ethanol (no glucose) and containing 5-fluoro-orotic acid (0.1%) at 30° C. to select for isolates that lost the URA3 marker. Colonies appearing after 24 to 48 hours were PCR screened for marker loss with 5′ and 3′ chromosome-specific primers N1239 and N1242. A positive PNY1730 ymr226cΔ markerless PCR screen resulted in a PCR product of 801 bp. The strain PNY1730 ymr226cΔ was designated PNY1758 (=MATa ura3Δ::loxP his3Δ::loxP pdc6Δ pdc1Δ::ilvD pdc5Δ::kivD(y) fra2Δ:: UAS(PGK1)-FBA1p-ilvD(y) gpd2Δ::loxP71/66-FBA1p-alsS-bdh1Δ::UAS(PGK1)-ENO2p-ilvD-ILV5p-adh ymr226cΔ).

[0410] PNY01758 was transformed with plasmid pK9D3.OLE1p.IlvD (SEQ ID NO: 284) carrying K9D3.KARI gene from Anaerostipes caccae DSM 14662 and carrying ilvD gene from Streptococcus mutans ATCC® No. 700610™. Competent cells of PNY01758 were made and transformed with plasmids pK9D3.OLE1p.IlvD (SEQ ID NO: 284) using a Frozen-EZ Yeast Transformation II™ kit (Zymo Research Corporation, Irvine, Calif.). Transformed cells were plated on synthetic complete media lacking uracil supplemented with 0.5% ethanol (no glucose) at 30° C. Resulting transformant was designated as the isobutanologen strain PNY01759 (=MATa ura3Δ::loxP his3Δ::loxP pdc6Δ pdc1Δ::ilvD pdc5Δ::kivD(y) fra2Δ::UAS(PGK1)-FBA1p-ilvD(y) gpd2Δ::loxP71/66-FBA1p-alsS bdh1Δ::UAS(PGK1)-ENO2p-ilvD-ILV5p-adh ymr226cΔ/pK9D3.OLE1p.IlvD).

[0411] PNY01759 is a histidine auxotroph strain. The auxotrophy of the strain was changed to uracil because the wild-type YAP1 and YAP1 variants were cloned into p416 plasmid with uracil selection marker. To change auxotrophy of PNY01759, uracil selection marker was replaced with a PCR cassette with ORF of histidine gene flanked by upstream and downstream of uracil selection marker of pK9D3.OLE1p.IlvD (SEQ ID NO: 284). The PCR cassette was amplified from pK9D3.OLE1p.IlvD (SEQ ID NO: 284) using primers oBB210 (SEQ ID NO: 285) and oBB211 (SEQ ID NO: 286). The PCR product was transformed in PNY01759 using a Frozen-EZ Yeast Transformation II™ kit (Zymo Research Corporation, Irvine, Calif.) and transformants were selected on synthetic complete media lacking histidine supplemented with 0.5% ethanol (no glucose). Selected transformants were confirmed for uracil auxotrophy by growing the transformants on 5-FOA plates. A colony was purified, and the amplification of HIS3 ORF was confirmed as well as no amplification of URA3 ORF. The resulting transformant was designated as PNY03047 (=MATa ura3Δ::loxP his3Δ::loxP pdc6Δ pdc1Δ::ilvD pdc5Δ::kivD(y) fra2Δ::UAS(PGK1)-FBA1p-ilvD(y) gpd2Δ::loxP71/66-FBA1p-alsS bdh1Δ::UAS(PGK1)-ENO2p-ilvD-ILV5p-adh ymr226cΔ/pK9D3.OLE1p.IlvD.HIS).

### Example 6

### Expression of Wild-Type YAP1 and YAP1 Variants in Isobutanol Strain

[0412] Plasmids (p416 TEF) carrying wild-type YAP1 or YAP1 variants were transformed in Saccharomyces cerevisiae strain PNY03047 using a Frozen-EZ Yeast Transformation II Kit™ (Zymo Research Corporation, Irvine, Calif.). Transformants were selected on synthetic complete media lacking histidine and uracil supplemented with 0.5% ethanol (no glucose). Transformants were purified on same plates and inoculated in liquid medium (synthetic complete media lacking histidine and uracil supplemented with 0.5% ethanol). Cells were grown in the same liquid media and concentrated to 20 OD₆₀₀ nm using cane production medium (CPM) (described below). The cells were incubated at 30° C. for 16 h with agitation (200 rpm). Isobutanol titer in the culture was estimated in HPLC assays. Results are shown in Table 12.

TABLE 12

| Isobutanol | Controls | | Variants of YAP1 Gene Overexpressed in Saccharomyces cerevisiae PNY03047 | | | | | | | | | |
|---|---|---|---|---|---|---|---|---|---|---|---|---|
| Titer, g/L | p416 vector | WT YAP1 | B5-1 | C5-2 | B8-4 | C5-3 | E5-4 | B8-1 | D8-1 | D8-4 | F8-1 | B5-4 |
| Isobutanol | 2.65 | 3.3 | 4.35 | 4.15 | 3.45 | 4.7 | 3.2 | 3.3 | 2.8 | 3.3 | 4.15 | 3.7 |
| titer (average) | | | | | | | | | | | | |

[0413] Cells overexpressing wild-type YAP1 and YAP1 variants produced more isobutanol compared to cells with p416 control. Isobutanol titer in cells overexpressing C5-2, C53, B5-1, and F8-1 is significantly higher compared to control.

[0414] Cane production medium (CPM) was prepared by dissolving the reagents listed in Table 13 in distilled water. Water was added to a volume of 1000 mL and the pH of the medium was adjusted to 5.5 by adding dilute acid/base. The vitamin solution used for preparation of CPM was made as 1000× stock (Table 14). The stock solution was prepared by dissolving reagents (except riboflavin) in 925 mL water. Riboflavin (0.75 gm) was dissolved in 75 mL 0.2 M sodium hydraxide solution and the pH was adjusted to 3.5 bp using dilute sulfuric acid. This 75 mL solution was added to the vitamin mix to make 1000 mL vitamin solution 1000×.

TABLE 13
Cane production medium (CPM)

| Ingredients | UOM | 1 L Medium |
|---|---|---|
| K₂HPO₄ | gm | 6.0 |
| CaCl₂•2H₂O | gm | 0.076 |
| MgSO₄•7H₂O | gm | 1.0 |
| MnCl₂•4H₂O | gm | 0.10 |
| ZnSO₄•7H₂O | gm | 0.029 |
| FeCl₃ | gm | 0.006 |
| Na₂SO₄ | gm | 0.16 |
| YNB w/o amino acid | gm | 13.4 |
| Yeast Extract | gm | 6.0 |
| Sucrose | gm | 25.0 |
| Ethanol | mL | 6.25 |
| Vitamin solution | mL | 1.0 |
| MES* | gm | 19.5 |
| Ampicillin (5%) | mL | 1.0 |
| Chloramphenicol | mL | 0.5 |
| (34 mg/mL) | | |
| Water (vol make up) | mL | 1000 |

Adjust pH to 5.50 ± 0.1
Filter sterilize and store at RT
*MES: (2-(N-morpholino)ethanesulfonic acid

TABLE 14
Vitamin Solution 1000X

| Chemical/Product: | UOM | 1 L Medium |
|---|---|---|
| Biotin (D−) | gm | 0.05 |
| Ca D(+) panthotenate | gm | 1.0 |
| Nicotinic acid | gm | 15.0 |
| Myo-inositol | gm | 25.0 |
| (for microbiology) | | |
| Thiamine chloride | gm | 20.0 |
| hydrochloride | | |
| Pyridoxol | gm | 1.0 |
| hydrochloride | | |
| p-Aminobenzoic acid | gm | 0.4 |
| Riboflavin | gm | 0.75 |
| Folic acid | gm | 0.004 |
| Water (vol make up) | mL | 1000 |

### Example 7

### Construction of Strain PNY2068

[0415] Saccharomyces cerevisiae strain PNY0827 was used as the host cell for further genetic manipulation. PNY0827 refers to a strain derived from Saccharomyces cerevisiae which has been deposited at the ATCC under the Budapest Treaty on Sep. 22, 2011 at the American Type Culture Collection, Patent Depository 10801 University Boulevard, Manassas, Va. 20110-2209 and has the patent deposit designation PTA-12105.

Deletion of URA3 and Sporulation into Haploids

[0416] In order to delete the endogenous URA3 coding region, a deletion cassette was PCR-amplified from pLA54 (SEQ ID NO: 179) which contains a P_{TEF1}-kanMX4-TEF1t cassette flanked by loxP sites to allow homologous recombination in vivo and subsequent removal of the KANMX4 marker. PCR was done by using Phusion® High Fidelity PCR Master Mix (New England BioLabs Inc.; Ipswich, Mass.) and primers BK505 (SEQ ID NO: 180) and BK506 (SEQ ID NO: 181). The URA3 portion of each primer was derived from the 5′ region 180 bp upstream of the URA3 ATG and 3′ region 78 bp downstream of the coding region such that integration of the kanMX4 cassette results in replacement of the URA3 coding region. The PCR product was transformed into PNY0827 using standard genetic techniques (Methods in Yeast Genetics, 2005, Cold Spring Harbor Laboratory Press, Cold Spring Harbor, N.Y., pp. 201-202) and transformants were selected on YEP medium supplemented 2% glucose and 100 μg/ml Geneticin at 30° C. Transformants were screened by colony PCR with primers LA468 (SEQ ID NO: 182) and LA492 (SEQ ID NO: 183) to verify presence of the integration cassette. A heterozygous diploid was obtained: NYLA98, which has the genotype MATa/α URA3/ura3::loxP-kanMX4-loxP. To obtain haploids, NYLA98 was sporulated using standard methods (Codon, et al., Appl. Environ. Microbiol. 61:630-638, 1995). Tetrads were dissected using a micromanipulator and grown on rich YPE medium supplemented with 2% glucose. Tetrads containing four viable spores were patched onto synthetic complete medium lacking uracil supplemented with 2% glucose, and the mating type was verified by multiplex colony PCR using primers AK109-1 (SEQ ID NO: 287), AK109-2 (SEQ ID NO: 288), and AK109-3 (SEQ ID NO: 289). The resulting identified haploid strain called NYLA103, which has the genotype: MATα ura3Δ::loxP-kanMX4-loxP, and NYLA106, which has the genotype: MATa ura3Δ::loxP-kanMX4-loxP.

### Deletion of His3

[0417] To delete the endogenous HIS3 coding region, a scarless deletion cassette was used. The four fragments for the PCR cassette for the scarless HIS3 deletion were amplified using Phusion® High Fidelity PCR Master Mix (New England BioLabs Inc.; Ipswich, Mass.) and CEN.PK 113-7D (CBS 8340; Centraalbureau voor Schimmelcultures (CBS) Fungal Biodiversiry Centre, Netherlands) genomic DNA as template, prepared with a Gentra® Puregene® Yeast/Bact. Kit (Qiagen, Valencia, Calif.). HIS3 Fragment A was amplified with primer oBP452 (SEQ ID NO: 290) and primer oBP453 (SEQ ID NO: 291), containing a 5′ tail with homology to the 5′ end of HIS3 Fragment B. HIS3 Fragment B was amplified with primer oBP454 (SEQ ID NO: 292), containing a 5′ tail with homology to the 3′ end of HIS3 Fragment A, and primer oBP455 (SEQ ID NO: 293) containing a 5′ tail with homology to the 5′ end of HIS3 Fragment U. HIS3 Fragment U was amplified with primer oBP456 (SEQ ID NO: 294), containing a 5′ tail with homology to the 3′ end of HIS3 Fragment B, and primer oBP457 (SEQ ID NO: 295), containing a 5′ tail with homology to the 5′ end of HIS3 Fragment C. HIS3 Fragment C was amplified with primer oBP458 (SEQ ID NO: 296), containing a 5′ tail with homology to the 3′ end of HIS3 Fragment U, and primer oBP459 (SEQ ID NO: 297). PCR products were purified with a PCR Purification kit (Qiagen, Valencia, Calif.). HIS3 Fragment AB was created by overlapping PCR by mixing HIS3 Fragment A and HIS3 Fragment B and amplifying with primers oBP452 (SEQ ID NO: 290) and oBP455 (SEQ ID NO: 293). HIS3 Fragment UC was created by overlapping PCR by mixing HIS3 Fragment U and HIS3 Fragment C and amplifying with primers oBP456 (SEQ ID NO: 294) and oBP459 (SEQ ID NO: 297). The resulting PCR products were purified on an agarose gel followed by a Gel Extraction kit (Qiagen, Valencia, Calif.). The HIS3 ABUC cassette was created by overlapping PCR by mixing HIS3 Fragment AB and HIS3 Fragment UC and amplifying with primers oBP452 (SEQ ID NO: 290) and oBP459 (SEQ ID NO: 297). The PCR product was purified with a PCR Purification kit (Qiagen, Valencia, Calif.). Competent cells of NYLA106 were transformed with the HIS3 ABUC PCR cassette and were plated on synthetic complete medium lacking uracil supplemented with 2% glucose at 30° C. Transformants were screened to verify correct integration by replica plating onto synthetic complete medium lacking histidine and supplemented with 2% glucose at 30° C. Genomic DNA preps were made to verify the integration by PCR using primers oBP460 (SEQ ID NO: 298) and LA135 (SEQ ID NO: 299) for the 5′ end and primers oBP461 (SEQ ID NO: 300) and LA92 (SEQ ID NO: 301) for the 3′ end. The URA3 marker was recycled by plating on synthetic complete medium supplemented with 2% glucose and 5-FOA at 30° C. following standard protocols. Marker removal was confirmed by patching colonies from the 5-FOA plates onto SD-URA medium to verify the absence of growth. The resulting identified strain, called PNY2003 has the genotype: MATa ura3Δ::loxP-kanMX4-loxP his3A.

### Deletion of PDC1

[0418] To delete the endogenous PDC1 coding region, a deletion cassette was PCR-amplified from pLA59 (SEQ ID NO: 252), which contains a URA3 marker flanked by degenerate loxP sites to allow homologous recombination in vivo and subsequent removal of the URA3 marker. PCR was done by using Phusion® High Fidelity PCR Master Mix (New England BioLabs Inc.; Ipswich, Mass.) and primers LA678 (SEQ ID NO: 302) and LA679 (SEQ ID NO: 303). The PDC1 portion of each primer was derived from the 5′ region 50 bp downstream of the PDC1 start codon and 3′ region 50 bp upstream of the stop codon such that integration of the URA3 cassette results in replacement of the PDC1 coding region but leaves the first 50 bp and the last 50 bp of the coding region. The PCR product was transformed into PNY2003 using standard genetic techniques and transformants were selected on synthetic complete medium lacking uracil and supplemented with 2% glucose at 30° C. Transformants were screened to verify correct integration by colony PCR using primers LA337 (SEQ ID NO: 304), external to the 5′ coding region and LA135 (SEQ ID NO: 299), an internal primer to URA3. Positive transformants were then screened by colony PCR using primers LA692 (SEQ ID NO: 305) and LA693 (SEQ ID NO: 306), internal to the PDC1 coding region. The URA3 marker was recycled by transforming with pLA34 (SEQ ID NO: 307) containing the CRE recombinase under the GAL1 promoter and plated on synthetic complete medium lacking histidine and supplemented with 2% glucose at 30° C. Transformants were plated on rich medium supplemented with 0.5% galactose to induce the recombinase. Marker removal was confirmed by patching colonies to synthetic complete medium lacking uracil and supplemented with 2% glucose to verify absence of growth. The resulting identified strain, called PNY2008 has the genotype: MATa ura3Δ::loxP-kanMX4-loxP his3Δ pdc1Δ::loxP71/66.

### Deletion of PDC5

[0419] To delete the endogenous PDC5 coding region, a deletion cassette was PCR-amplified from pLA59 (SEQ ID NO: 252), which contains a URA3 marker flanked by degenerate loxP sites to allow homologous recombination in vivo and subsequent removal of the URA3 marker. PCR was done by using Phusion® High Fidelity PCR Master Mix (New England BioLabs Inc.; Ipswich, Mass.) and primers LA722 (SEQ ID NO: 308) and LA733 (SEQ ID NO: 309). The PDC5 portion of each primer was derived from the 5′ region 50 bp upstream of the PDC5 start codon and 3′ region 50 bp downstream of the stop codon such that integration of the URA3 cassette results in replacement of the entire PDC5 coding region. The PCR product was transformed into PNY2008 using standard genetic techniques and transformants were selected on synthetic complete medium lacking uracil and supplemented with 1% ethanol at 30° C. Transformants were screened to verify correct integration by colony PCR using primers LA453 (SEQ ID NO: 310), external to the 5′ coding region and LA135 (SEQ ID NO: 299), an internal primer to URA3. Positive transformants were then screened by colony PCR using primers LA694 (SEQ ID NO: 311) and LA695 (SEQ ID NO: 312), internal to the PDC5 coding region. The URA3 marker was recycled by transforming with pLA34 (SEQ ID NO: 307) containing the CRE recombinase under the GAL1 promoter and plated on synthetic complete medium lacking histidine and supplemented with 1% ethanol at 30° C. Transformants were plated on rich YEP medium supplemented with 1% ethanol and 0.5% galactose to induce the recombinase. Marker removal was confirmed by patching colonies to synthetic complete medium lacking uracil and supplemented with 1% ethanol to verify absence of growth. The resulting identified strain, called PNY2009 has the genotype: MATa ura3Δ::loxP-kanMX4-loxP his3Δ pdc1Δ::loxP71/66 pdc5Δ::loxP71/66.

### Deletion of FRA2

[0420] The FRA2 deletion was designed to delete 250 nucleotides from the 3′ end of the coding sequence, leaving the first 113 nucleotides of the FRA2 coding sequence intact. An in-frame stop codon was present 7 nucleotides downstream of the deletion. The four fragments for the PCR cassette for the scarless FRA2 deletion were amplified using Phusion® High Fidelity PCR Master Mix (New England BioLabs Inc.; Ipswich, Mass.) and CEN.PK 113-7D (CBS 8340; Centraalbureau voor Schimmelcultures (CBS) Fungal Biodiversiry Centre, Netherlands) genomic DNA as template, prepared with a Gentra® Puregene® Yeast/Bact. kit (Qiagen, Valencia, Calif.). FRA2 Fragment A was amplified with primer oBP594 (SEQ ID NO: 313) and primer oBP595 (SEQ ID NO: 314), containing a 5′ tail with homology to the 5′ end of FRA2 Fragment B. FRA2 Fragment B was amplified with primer oBP596 (SEQ ID NO: 315), containing a 5″ tail with homology to the 3′ end of FRA2 Fragment A, and primer oBP597 (SEQ ID NO: 316), containing a 5′ tail with homology to the 5′ end of FRA2 Fragment U. FRA2 Fragment U was amplified with primer oBP598 (SEQ ID NO: 317), containing a 5′ tail with homology to the 3′ end of FRA2 Fragment B, and primer oBP599 (SEQ ID NO: 318), containing a 5′ tail with homology to the 5′ end of FRA2 Fragment C. FRA2 Fragment C was amplified with primer oBP600 (SEQ ID NO: 319), containing a 5′ tail with homology to the 3′ end of FRA2 Fragment U, and primer oBP601 (SEQ ID NO: 320). PCR products were purified with a PCR Purification kit (Qiagen, Valencia, Calif.). FRA2 Fragment AB was created by overlapping PCR by mixing FRA2 Fragment A and FRA2 Fragment B and amplifying with primers oBP594 (SEQ ID NO: 313) and oBP597 (SEQ ID NO: 316). FRA2 Fragment UC was created by overlapping PCR by mixing FRA2 Fragment U and FRA2 Fragment C and amplifying with primers oBP598 (SEQ ID NO: 317) and oBP601 (SEQ ID NO: 320). The resulting PCR products were purified on an agarose gel followed by a Gel Extraction kit (Qiagen, Valencia, Calif.). The FRA2 ABUC cassette was created by overlapping PCR by mixing FRA2 Fragment AB and FRA2 Fragment UC and amplifying with primers oBP594 (SEQ ID NO: 313) and oBP601 (SEQ ID NO: 320). The PCR product was purified with a PCR Purification kit (Qiagen, Valencia, Calif.).

[0421] To delete the endogenous FRA2 coding region, the scarless deletion cassette obtained above was transformed into PNY2009 using standard techniques and plated on synthetic complete medium lacking uracil and supplemented with 1% ethanol. Genomic DNA preps were made to verify the integration by PCR using primers oBP602 (SEQ ID NO: 247) and LA135 (SEQ ID NO: 299) for the 5′ end, and primers oBP602 (SEQ ID NO: 247) and oBP603 (SEQ ID NO: 321) to amplify the whole locus. The URA3 marker was recycled by plating on synthetic complete medium supplemented with 1% ethanol and 5-FOA (5-Fluoroorotic Acid) at 30° C. following standard protocols. Marker removal was confirmed by patching colonies from the 5-FOA plates onto synthetic complete medium lacking uracil and supplemented with 1% ethanol to verify the absence of growth. The resulting identified strain, PNY2037, has the genotype: MATa ura3Δ::loxP-kanMX4-loxP his3Δ pdc1Δ::loxP71/66 pdc5Δ::loxP71/66 fra2Δ.

### Addition of Native 2 Micron Plasmid

[0422] The loxP71-URA3-loxP66 marker was PCR-amplified using Phusion DNA polymerase (New England BioLabs; Ipswich, Mass.) from pLA59 (SEQ ID NO: 252), and transformed along with the LA811 (SEQ ID NO: 322) and LA817 (SEQ ID NO: 323) and LA812 (SEQ ID NO: 324) and LA818 (SEQ ID NO: 325) 2-micron plasmid fragments into strain PNY2037 on SE-URA plates at 30° C. The resulting strain PNY2037 2μ::loxP71-URA3-loxP66 was transformed with pLA34 (pRS423::cre) (also called, pLA34) (SEQ ID NO: 307) and selected on SE-HIS-URA plates at 30° C. Transformants were patched onto YP-1% galactose plates and allowed to grow for 48 hr at 30° C. to induce Cre recombinase expression. Individual colonies were then patched onto SE-URA, SE-HIS, and YPE plates to confirm URA3 marker removal. The resulting identified strain, PNY2050, has the genotype: MATa ura3Δ::loxP-kanMX4-loxP, his3Δ pdc1Δ::loxP71/66 pdc5Δ::loxP71/66 fra2Δ 2-micron.

### Deletion of GPD2

[0423] To delete the endogenous GPD2 coding region, a deletion cassette was PCR-amplified from pLA59 (SEQ ID NO: 252), which contains a URA3 marker flanked by degenerate loxP sites to allow homologous recombination in vivo and subsequent removal of the URA3 marker. PCR was done by using Phusion® High Fidelity PCR Master Mix (New England BioLabs Inc.; Ipswich, Mass.) and primers LA512 (SEQ ID NO: 326) and LA513 (SEQ ID NO: 327). The GPD2 portion of each primer was derived from the 5′ region 50 bp upstream of the GPD2 start codon and 3′ region 50 bp downstream of the stop codon such that integration of the URA3 cassette results in replacement of the entire GPD2 coding region. The PCR product was transformed into PNY2050 using standard genetic techniques and transformants were selected on synthetic complete medium lacking uracil and supplemented with 1% ethanol at 30° C. Transformants were screened to verify correct integration by colony PCR using primers LA516 (SEQ ID NO: 328), external to the 5′ coding region and LA135 (SEQ ID NO: 299), internal to URA3. Positive transformants were then screened by colony PCR using primers LA514 (SEQ ID NO: 329) and LA515 (SEQ ID NO: 330), internal to the GPD2 coding region. The URA3 marker was recycled by transforming with pLA34 (SEQ ID NO: 307) containing the CRE recombinase under the GAL1 promoter and plated on synthetic complete medium lacking histidine and supplemented with 1% ethanol at 30° C. Transformants were plated on rich medium supplemented with 1% ethanol and 0.5% galactose to induce the recombinase. Marker removal was confirmed by patching colonies to synthetic complete medium lacking uracil and supplemented with 1% ethanol to verify absence of growth. The resulting identified strain, PNY2056, has the genotype: MATa ura3Δ::loxP-kanMX4-loxP his3A pdc1Δ:: loxP71/66 pdc54::loxP71/66 fra2Δ 2-micron gpd2Δ.

Deletion of YMR226 and integration of AlsS

[0424] To delete the endogenous YMR226C coding region, an integration cassette was PCR-amplified from pLA71 (SEQ ID NO: 331), which contains the gene acetolactate synthase from the species Bacillus subtilis with a FBA1 promoter and a CYC1 terminator, and a URA3 marker flanked by degenerate loxP sites to allow homologous recombination in vivo and subsequent removal of the URA3 marker. PCR was done by using KAPA HiFi™ (Kapa Biosystems, Woburn, Mass.) and primers LA829 (SEQ ID NO: 332) and LA834 (SEQ ID NO: 333). The YMR226C portion of each primer was derived from the first 60 bp of the coding sequence and 65 bp that are 409 bp upstream of the stop codon. The PCR product was transformed into PNY2056 using standard genetic techniques and transformants were selected on synthetic complete medium lacking uracil and supplemented with 1% ethanol at 30° C. Transformants were screened to verify correct integration by colony PCR using primers N1257 (SEQ ID NO: 278), external to the 5′ coding region and LA740 (SEQ ID NO: 334), internal to the FBA1 promoter. Positive transformants were then screened by colony PCR using primers N1257 (SEQ ID NO: 278) and LA830 (SEQ ID NO: 335), internal to the YMR226C coding region, and primers LA830 (SEQ ID NO: 335), external to the 3′ coding region, and LA92 (SEQ ID NO: 336), internal to the URA3 marker. The URA3 marker was recycled by transforming with pLA34 (SEQ ID NO: 307) containing the CRE recombinase under the GAL1 promoter and plated on synthetic complete medium lacking histidine and supplemented with 1% ethanol at 30° C. Transformants were plated on rich medium supplemented with 1% ethanol and 0.5% galactose to induce the recombinase. Marker removal was confirmed by patching colonies to synthetic complete medium lacking uracil and supplemented with 1% ethanol to verify absence of growth. The resulting identified strain, PNY2061, has the genotype: MATa ura3Δ::loxP-kanMX4-loxP his3Δ pdc1Δ::loxP71/66 pdc5 Δ::loxP71/66 fra2Δ 2-micron gpd2Δ ymr226cΔ::P_{FBA1}-alsS_Bs-CYC1t-loxP71/66.

Deletion of ALD6 and integration of KivD

[0425] To delete the endogenous ALD6 coding region, an integration cassette was PCR-amplified from pLA78 (SEQ ID NO: 337), which contains the kivD gene from the species Listeria grayi with a hybrid FBA1 promoter and a TDH3 terminator, and a URA3 marker flanked by degenerate loxP sites to allow homologous recombination in vivo and subsequent removal of the URA3 marker. PCR was done by using KAPA HiFi™ (Kapa Biosystems, Woburn, Mass.) and primers LA850 (SEQ ID NO: 338) and LA851 (SEQ ID NO: 339). The ALD6 portion of each primer was derived from the first 65 bp of the coding sequence and the last 63 bp of the coding region. The PCR product was transformed into PNY2061 using standard genetic techniques and transformants were selected on synthetic complete medium lacking uracil and supplemented with 1% ethanol at 30° C. Transformants were screened to verify correct integration by colony PCR using primers N1262 (SEQ ID NO: 340), external to the 5′ coding region and LA740 (SEQ ID NO: 334), internal to the FBA1 promoter. Positive transformants were then screened by colony PCR using primers N1263 (SEQ ID NO: 341), external to the 3′ coding region, and LA92 (SEQ ID NO: 336), internal to the URA3 marker. The URA3 marker was recycled by transforming with pLA34 (SEQ ID NO: 307) containing the CRE recombinase under the GAL1 promoter and plated on synthetic complete medium lacking histidine and supplemented with 1% ethanol at 30° C. Transformants were plated on rich medium supplemented with 1% ethanol and 0.5% galactose to induce the recombinase. Marker removal was confirmed by patching colonies to synthetic complete medium lacking uracil and supplemented with 1% ethanol to verify absence of growth. The resulting identified strain, PNY2065, has the genotype: MATa ura3Δ::loxP-kanMX4-loxP his3Δ pdc1Δ::loxP71/66 pdc5Δ:: loxP71/66 fra2Δ 2-micron gpd2Δ ymr226cΔ::P_{FBA1}-alsS_Bs-CYC1t-loxP71/66 ald6Δ::(UAS)PGK1-P_{FBA1}-kivD_Lg-TDH3t-loxP71.

Deletion of ADH1 and integration of ADH

[0426] ADH1 is the endogenous alcohol dehydrogenase present in Saccharomyces cerevisiae. As described below, the endogenous ADH1 was replaced with alcohol dehydrogenase (ADH) from Beijerinckii indica.

[0427] To delete the endogenous ADH1 coding region, an integration cassette was PCR-amplified from pLA65 (SEQ ID NO: 342), which contains the alcohol dehydrogenase from the species Beijerinckii indica with an ILV5 promoter and a ADH1 terminator, and a URA3 marker flanked by degenerate loxP sites to allow homologous recombination in vivo and subsequent removal of the URA3 marker. PCR was done by using KAPA HiFi™ (Kapa Biosystems, Woburn, Mass.) and primers LA855 (SEQ ID NO: 343) and LA856 (SEQ ID NO: 344). The ADH1 portion of each primer was derived from the 5′ region 50 bp upstream of the ADH1 start codon and the last 50 bp of the coding region. The PCR product was transformed into PNY2065 using standard genetic techniques and transformants were selected on synthetic complete medium lacking uracil and supplemented with 1% ethanol at 30° C. Transformants were screened to verify correct integration by colony PCR using primers LA414 (SEQ ID NO: 345), external to the 5′ coding region and LA749 (SEQ ID NO: 346), internal to the ILV5 promoter. Positive transformants were then screened by colony PCR using primers LA413 (SEQ ID NO: 347), external to the 3′ coding region, and LA92 (SEQ ID NO: 336), internal to the URA3 marker. The URA3 marker was recycled by transforming with pLA34 (SEQ ID NO: 307) containing the CRE recombinase under the GAL1 promoter and plated on synthetic complete medium lacking histidine and supplemented with 1% ethanol at 30° C. Transformants were plated on rich medium supplemented with 1% ethanol and 0.5% galactose to induce the recombinase. Marker removal was confirmed by patching colonies to synthetic complete medium lacking uracil and supplemented with 1% ethanol to verify absence of growth. The resulting identified strain, called PNY2066 has the genotype: MATa ura3Δ::loxP-kanMX4-loxP his3A pdc1Δ::loxP71/66 pdc5Δ::loxP71/66 fra2Δ 2-micron gpd2Δ ymr226cΔ::P_{FBA1}-alsS_Bs-CYC1t-loxP71/66 ald6Δ::(UAS)PGK1-P_{FBA1}-kivD_Lg-TDH3t-loxP71/66 adh1Δ::P_{ILV5}-ADH_Bi(y)-ADH1t-loxP71/66.

Integration of ADH into pdc1Δ Locus

[0428] To integrate an additional copy of ADH at the pdc1Δ region, an integration cassette was PCR-amplified from pLA65 (SEQ ID NO: 342), which contains the alcohol dehydrogenase from the species Beijerinckii indica with an ADH1 terminator, and a URA3 marker flanked by degenerate loxP sites to allow homologous recombination in vivo and subsequent removal of the URA3 marker. PCR was done by using KAPA HiFi™ (Kapa Biosystems, Woburn, Mass.) and primers LA860 (SEQ ID NO: 348) and LA679 (SEQ ID NO: 303). The PDC1 portion of each primer was derived from the 5′ region 60 bp upstream of the PDC1 start codon and 50 bp that are 103 bp upstream of the stop codon. The endogenous PDC1 promoter was used. The PCR product was transformed into PNY2066 using standard genetic techniques and transformants were selected on synthetic complete medium lacking uracil and supplemented with 1% ethanol at 30° C. Transformants were screened to verify correct integration by colony PCR using primers LA337 (SEQ ID NO: 304), external to the 5′ coding region and N1093 (SEQ ID NO: 349), internal to the BiADH gene. Positive transformants were then screened by colony PCR using primers LA681 (SEQ ID NO: 350), external to the 3′ coding region, and LA92 (SEQ ID NO: 336), internal to the URA3 marker. The URA3 marker was recycled by transforming with pLA34 (SEQ ID NO: 307) containing the CRE recombinase under the GAL1 promoter and plated on synthetic complete medium lacking histidine and supplemented with 1% ethanol at 30° C. Transformants were plated on rich medium supplemented with 1% ethanol and 0.5% galactose to induce the recombinase. Marker removal was confirmed by patching colonies to synthetic complete medium lacking uracil and supplemented with 1% ethanol to verify absence of growth. The resulting identified strain, called PNY2068 has the genotype: MATa ura3Δ::loxP-kanMX4-loxP his3Δ pdc1Δ::loxP71/66 pdc5Δ::loxP71/66 fra2Δ 2-micron gpd2Δ ymr226cΔ::P_{FBA1}-alsS_Bs-CYC1t-loxP71/66 ald6Δ::(UAS)PGK1-P_{FBA1}-kivD_Lg-TDH3t-loxP71/66 adh1Δ::P_{ILV5}-ADH_Bi(y)-ADH1t-loxP71/66 pdc1Δ::P_{PDC1}-ADH_Bi(y)-ADH1t-loxP71/66.

[0429] The strain PNY2068 was transformed with the plasmid pLH689 which includes genes encoding enzymes of the isobutanol pathway. The plasmid pLH689 [pHR81-Ilv5p-K9JB4P.KARI-TEF(M7)p-IlvD.Strep] (SEQ ID NO: 351) was constructed to contain a chimeric gene having the coding region of a variant of the ilvC gene from Anaerostipes caccae (protein—SEQ ID NO: 352; nucleotide—SEQ ID NO: 353) (nt 1628-2659) expressed from the yeast ILV5 promoter (nt 427-1620) and followed by the ILV5 terminator (nt 2685-3307) for expression of KARI, and the coding sequence of the ilvD gene from Streptococcus mutans (nt position 5377-3641) expressed from the yeast TEF(M7) mutant promoter (nt 5787-5387) (Alper, et al., Proc. Natl. Acad. Sci. 102:12678-12683, 2005) and followed by the FBA1 terminator (nt 3632-3320) for expression of DHAD.

### Example 8

### Expression of Genes Associated with the Oxidative Stress Pathway

[0430] Genes associated with the oxidative stress pathway were expressed in an isobutanologen to analyze the impact of overexpression of these genes on growth and isobutanol production.

[0431] A control plasmid, pBP2642 (SEQ ID NO: 354), was generated from the plasmid pRS413 (ATCC® No. 97518™). The plasmid pBP2642 (pRS413-GPM1p-ADHt) contains GPM1 promoter followed by ADH1 terminator.

[0432] TRX2 (SEQ ID NO: 355), YBP1 (SEQ ID NO: 28), and YAP1 (SEQ ID NO: 3) were PCR amplified using yeast strain Saccharomyces cerevisiae PNY827 (ATCC® Patent Deposit Designation: PTA-12105) genomic DNA as template. TRX2 was amplified using PCR primers OT1666 (SEQ ID NO: 356) and OT1667 (SEQ ID NO: 357) and cloned into the plasmid pBP2642, generating pRS413-GPM1-TRX2 (SEQ ID NO: 358). Plasmid pRS413-GPM1-TRX2 is a single copy plasmid which consists of a chimeric gene having the coding sequence of TRX2 gene expressed from the yeast GPM1 promoter, and followed by the ADH1 terminator.

[0433] YBP1 was amplified using PCR primers OT1656 (SEQ ID NO: 359) and OT1657 (SEQ ID NO: 360) and cloned into the plasmid pBP2642, generating pRS413-GPM1-YBP1 (SEQ ID NO: 361). Plasmid pRS413-GPM1-YBP1 is a single copy plasmid which consists of a chimeric gene having the coding sequence of YBP1 gene expressed from the yeast GPM1 promoter, and followed by the ADH1 terminator.

[0434] YAP1 was amplified using PCR primers OT1595 (SEQ ID NO: 362) and OT1596 (SEQ ID NO: 363) and cloned into the plasmid pBP2642, generating pRS413-GPM1-YAP1 (SEQ ID NO: 364). Plasmid pRS413-GPM1-YAP1 is a single copy plasmid which consists of a chimeric gene having the coding sequence of YAP1 gene expressed from the yeast GPM1 promoter, and followed by the CYC1 terminator.

[0435] The yeast strain PNY2068 was transformed with the plasmid pLH689, and either the control plasmid pBP2642 or a plasmid expressing TRX2 (pRS413-GPM1-Trx2), YBP1 (pRS413-GPM1-Ybp1), or YAP1 (pRS413-GPM1-YAP1) (Table 15).

TABLE 15

| Strain | Host | Plasmid | Plasmid |
|---|---|---|---|
| YS348 | PNY2068 | pBP2642 | pRS413-GPM1 |
| YS349 | PNY2068 | pLH692 | pRS413-GPM1-TRX2 |
| YS355 | PNY2068 | pLH698 | pRS413-GPM1-YBP1 |
| YS369 | PNY2068 | pLH769 | pRS413-GPM1-YAP1 |

[0436] The transformed cells were plated onto SE-Ura-His agar plates. SE-Ura-His media is synthetic minimal dropout media. The standard Synthetic Minimal Dropout Media that contains 2% ethanol (SE media) as carbon source is described in Table 16 and standard Synthetic Minimal Dropout Media that contains 2-3% glucose (SD media) as carbon source is described in Table 17.

TABLE 16
Synthetic Minimal Dropout Media (2% ethanol)

| Ingredients | UOM | 1 L Medium |
|---|---|---|
| Yeast Nitrogen Base without | gm | 6.7 |
| Amino Acids | | |
| Amino Acid Dropout | gm | 0.75 |
| Supplement (-Ura, -His) | | |
| 100% Ethanol | mL | 20 |
| Water (vol make up) | mL | 1000 |

Filter sterilize

TABLE 17
Synthetic Minimal Dropout Media (2-3% glucose)

| Ingredients | UOM | 1 L Medium |
|---|---|---|
| Yeast Nitrogen Base without | gm | 6.7 |
| Amino Acids | | |
| Amino Acid Dropout | gm | 0.75 |
| Supplement (-Ura, -His) | | |
| 50% Glucose | | |
| NaOAc (3M) (Final: 2 mM) | mL | 0.67 |
| MES, pH 5.5 (1M) | mL | 50 |
| (Final: 50 mM) | | |
| Thiamine (5 g/L) | mL | 6 |
| (Final: 30 mg/L) | | |
| Nicotinic acid (5 g/L) | mL | 6 |
| (Final: 30 mg/L) | | |
| Water (vol make up) | mL | 1000 |

Filter sterilize

### Example 9

### Glucose Consumption and Isobutanol Production

[0437] Transformed yeast cells were grown on the SE-Ura-His plates for about five days. Colonies were re-streaked onto SE-Ura-His agar plates as cell patches and incubated at 30° C. for two days. The cell patches were used to inoculate 10 mL SE-Ura-His media containing 0.3% glucose and 2 mM NaOAc, and grown overnight aerobically in 125 mL plastic shake flasks at 30° C. and 250 rpm, to ˜2 OD. The shake flasks have a lid with a sterile filter which facilitates aeration (VWR International, LLC, Arlington Heights, Ill.). After the overnight incubation, the cells were centrifuged for 5 min at 3000 rpm at room temperature, and re-suspended in 1 mL SD-Ura-His media with 3% glucose and 2 mM sodium acetate. An appropriate volume of cells were used to inoculate 30 mL of the same media in a 125 mL shake flask so that the OD₆₀₀ of the culture was at 0.2. The cultures were then incubated aerobically at 30° C. for 5-6 h at 250 rpm, until the OD₆₀₀ was about 0.4-0.5. The cells were centrifuged again for 5 min at 3000 rpm at room temperature. After re-suspending the cell pellets in 30 mL of SD-Ura-His media with 3% glucose and 2 mM sodium acetate, the cells were transferred to 60 mL serum vials and closed with crimped top rubber lid (to limit oxygen transfer). Three replicate cultures were grown for each strain in serum vials and the cultures were incubated at 30° C. for 41 h at 200 rpm. The OD₆₀₀ of the cultures was measured at time 0 h and at 41 h. The results are shown in Table 18.

TABLE 18

| | OD₆₀₀ | OD₆₀₀ |
|---|---|---|
| Strains | (time = 0 h) | (time = 41 h) |
| YS348 | 0.3 | 1.69 |
| YS349 | 0.3 | 2.37 |
| YS355 | 0.3 | 1.89 |
| YS369 | 0.3 | 1.53 |

[0438] As shown in Table 18, the control strain YS348 had an OD₆₀₀ of 1.69 OD and the TRX2-expressing strain YS349 had an OD₆₀₀ of 2.37, suggesting a growth improvement of the YS349 strain due to the overexpression of TRX2 under the yeast GPM1 promoter.

[0439] Glucose consumption and isobutanol titer were also measured. The results are shown in Table 19. Data is average of three replicates and units are mM. With an initial glucose concentration at 176 mM, all cultures had glucose remaining in the serum vials after 41 h incubation. For isobutanol titer, YS349 had a higher isobutanol titer compared to YS348 (control). Therefore, overexpression of the TRX2 gene under the GPM1 promoter led to both improved growth and higher titer of the isobutanol producing strain.

TABLE 19

| | Glucose | Isobutanol |
|---|---|---|
| | Consumption | Titer |
| Strains | (mM) | (mM) |
| YS348 | 144.6 | 88.2 |
| YS349 | 157.5 | 101.7 |
| YS355 | 142.8 | 91.9 |
| YS369 | 130.0 | 88.3 |

[0440] In terms of isobutanol yields, YS349, YS355, and YS369 generated at least >10% yield improvement (Table 20). The data is the average of three replicates and the yields were calculated as titer of isobutanol (g/L) divided by glucose consumption (g/L). The data suggests that expression of TRX2, YBP1, and YAP1 under an appropriate promoter (e.g., GPM1) can improve the oxidative stress tolerance of the host strain, which can result in an improvement in strain performance.

TABLE 20

| | Isobutanol Yield |
|---|---|
| Strains | (g/g) |
| YS348 | 0.25 |
| YS349 | 0.27 |
| YS355 | 0.27 |
| YS369 | 0.28 |

[0441] It is possible that the combined expression of one or more of the genes associated with the oxidative stress pathway including TRX1, TRX2, YBP1, YAP1, GSH1, GPX1, and TRR1 can further improve the oxidative stress tolerance of alcohol-producing strains such as isobutanol-producing strains.

### Example 10

### Expression of Repeat Motifs

[0442] YAP1.MT1 mutant was designed to contain the insertion of the nucleotide sequence SEQ ID NO: 365 between nucleotide 1231 and 1232 in the wild type YAP1 gene. Two PCR reactions were performed using the Saccharomyces cerevisiae PNY827 (ATCC® Patent Deposit Designation: PTA-12105) genomic DNA as template to obtain Fragment 1, with 5′ primer OT1595 (SEQ ID NO: 362) and 3′ PCR primer OT1713 (SEQ ID NO: 366); and Fragment 2, with 5′ primer OT1695 (SEQ ID NO: 367) and OT1596 (SEQ ID NO: 363). The PCR reaction was performed using Phusion® DNA polymerase (New England BioLabs Inc., Ipswich, Mass.) using standard conditions. Fragment 1 and 2 were purified and annealed by PCR reaction at 10 cycles of 98° C., 1s, 63° C., 5s, 72° C., 45s, and 72° C. for 45s. The annealed product was further amplified using OT1595 (SEQ ID NO: 362) and OT1596 (SEQ ID NO: 363) to give the fusion PCR product of YAP1.MT, which was subcloned into pCR®-Blunt-TOPO® vector (Invitrogen, Life Technologies, Grand Island, N.Y.) and verified by sequencing. YAP1.MT1 protein contains the insertion of amino acid sequence, STGSTD.

[0443] All documents cited herein, including journal articles or abstracts, published or corresponding U.S. or foreign patent applications, issued or foreign patents, or any other documents, are each entirely incorporated by reference herein, including all data, tables, figures, and text presented in the cited documents.

[0444] Those skilled in the art will recognize, or be able to ascertain using no more than routine experimentation, many equivalents to the specific embodiments of the invention described herein. Such equivalents are intended to be encompassed by the following claims.

The application's sequence listing, which the Patent Office published only in electronic form, follows.

SEQUENCE LISTING (367 sequences)

SEQ ID NO: 1 - DNA, 18 bp, Artificial Sequence
  Nucleotide sequence for tripeptide repeat region
atagcactggtagcactg

SEQ ID NO: 2 - DNA, 1953 bp, Saccharomyces cerevisiae
atgagtgtgtctaccgccaagaggtcgctggatgtcgtttctccgggttcattagcggagtttgagggttcaaaatctcgtcacgatgaaatagaaaatgaacatagacgtactggtacacgtgatggcgaggatagcgagcaaccgaagaagaagggtagcaaaactagcaaaaagcaagatttggatcctgaaactaagcagaagaggactgcccaaaatcgggccgctcaaagagcttttagggaacgtaaggagaggaagatgaaggaattggagaagaaggtacaaagtttagagagtattcagcagcaaaatgaagtggaagctacttttttgagggaccagttaatcactctggtgaatgagttaaaaaaatatagaccagagacaagaaatgactcaaaagtgctggaatatttagcaaggcgagatcctaatttgcatttttcaaaaaataacgttaaccacagcaatagcgagccaattgacacacccaatgatgacatacaagaaaatgttaaacaaaagatgaatttcacgtttcaatatccgcttgataacgacaacgacaacgacaacagtaaaaatgtggggaaacaattaccttcaccaaatgatccaagtcattcggctcctatgcctataaatcagacacaaaagaaattaagtgacgctacagattcctccagcgctactttggattccctttcaaatagtaacgatgttcttaataacacaccaaactcctccacttcgatggattggttagataatgtaatatatactaacaggtttgtgtcaggtgatgatggcagcaatagtaaaactaagaatttagacagtaatatgttttctaatgactttaattttgaaaaccaatttgatgaacaagtttcggagttttgttcgaaaatgaaccaggtatgtggaacaaggcaatgtcccattcccaagaaacccatctcggctcttgataaagaagttttcgcgtcatcttctatactaagttcaaattctcctgctttaacaaatacttgggaatcacattctaatattacagataatactcctgctaatgtcattgctactgatgctactaaatatgaaaattccttctccggttttggccgacttggtttcgatatgagtgccaatcattacgtcgtgaatgataatagcactggtagcactgatagcactggtagcactggcaataagaacaaaaagaacaataataatagcgatgatgtactcccattcatatccgagtcaccgtttgatatgaaccaagttactaatttttttagtccgggatctaccggcatcggcaataatgctgcctctaacaccaatcccagcctactgcaaagcagcaaagaggatataccttttatcaacgcaaatctggctttcccagacgacaattcaactaatattcaattacaacctttctctgaatctcaatctcaaaataagtttgactacgacatgttttttagagattcatcgaaggaaggtaacaatttatttggagagtttttagaggatgacgatgatgacaaaaaagccgctaatatgtcagacgatgagtcaagtttaatcaagaaccagttaattaacgaagaaccagagcttccgaaacaatatctacaatcggtaccaggaaatgaaagcgaaatctcacaaaaaaatggcagtagtttacagaatgctgacaaaatcaataatggcaatgataacgataatgataatgatgtcgttccatctaaggaaggctctttactaaggtgttcggaaatttgggatagaataacaacacatccgaaatactcagatattgatgtcgatggtttatgttccgagctaatggcaaaggcaaaatgttcagaaagaggggttgtcatcaatgcagaagacgttcaattagctttgaataagcatatgaactaa

SEQ ID NO: 3 - DNA, 1971 bp, Saccharomyces cerevisiae
atgagtgtgtctaccgccaagaggtcgctggatgtcgtttctccgggttcattagcggagtttgagggttcaaaatctcgtcacgatgaaatagaaaatgaacatagacgtactagtacacgtgatggcgaggatagcgagcaaccgaagaagaagggtagcaaaactagcaaaaagcaagatttggatcctgaaactaagcagaagaggactgcccaaaatcgggccgctcaaagagcttttagggaacgtaaggagaggaagatgaaggaattggagaagaaggtacaaagtttagagagtattcagcagcaaaatgaagtggaagctacttttttgagggaccagttaatcactctggtgaatgagttaaaaaaatatagaccagagacaagaaatgactcaaaagtgctggaatatttagcaaggcgagatcctaatttgcatttttcaaaaaataacgttaaccacagcaatagcgagccaattgacacacccaatgatgacatacaagaaaatgttaaacaaaagatgaatttcacgtttcaatatccgcttgataacgacaacgacaacgactacagtaaaaatgtggggaaacaattaccttcaccaaatgatccaagtcattcggctcctatgcctataaatcagacacaaaagaaattaagtgacgctacagattcctccagcgctactttggattccctttcaaatagtaacgatgttcttaataacacaccaaactcctccacttcgatggattggttagataatgtaatatatactaacaggtttgtgtcaggtgatgatggcagcaatagtaaaactaagaatttagacagtaatatgttttctaatgactttaattttgaaaaccaatttgatgaacaagtttcggagttttgttcgaaaatgaaccaggtatgtggaacaaggcaatgtcccattcccaagaaacccatctcggctcttgataaagaagttttcgcgtcatcttctatactaagttcaaattctcctgctttaacaaatacttgggaatcacattctaatattacagataatactcctgctaatgtcactgctactgatgctactaaatatgaaaattccttctccggttttggccgacttggtttcgatatgagtgccaatcattacgtcgtgaatgataatagcactggtagcactgatagcactggtagcactgatagcactggtagcactggcaataagaacaaaaagaacaataataatagcgatgatgtactcccattcatatccgagtcaccgtttgatatgaaccaagttactaatttttttagtccgggatctaccggcatcggcaataatgctgcctctaacaccaatcccagcctactgcaaagcagcaaagaggatataccttttatcaacgcaaatctggctttcccagacgacaattcaactaatattcaattacaacctttctctgaatctcaatctcaaaataagtctgactacgacatgttttttagagattcatcgaaggaaggtaacaatttatttggagagtttttagaggatgacgatgatgacaaaaaagccgctaatatgtcagacgatgagtcaagtttaatcaagaaccagttaattaacgaagaaccagagcttccgaaacaatatctacaatcggtaccaggaaatgaaagcgaaatctcacaaaaaaatggcagtagtttacagaatgctgacaagatcaataatggtaatgataacgataatgataatgatgtcgttccatctaaggaaggctctttactaaggtgttcggaaatttgggatagaataacaacacatccgaaatactcagatattgatgtcgatggtttatgttccgagctaatggcaaaggcaaaatgttcagaaagaggggttgtcatcaatgcagaagacgttcaattagctttgaataagcatatgaactaa

SEQ ID NO: 4 - protein, 656 aa, Saccharomyces cerevisiae
MSVSTAKRSLDVVSPGSLAEFEGSKSRHDEIENEHRRTSTRDGEDSEQPKKKGSKTSKKQDLDPETKQKRTAQNRAAQRAFRERKERKMKELEKKVQSLESIQQQNEVEATFLRDQLITLVNELKKYRPETRNDSKVLEYLARRDPNLHFSKNNVNHSNSEPIDTPNDDIQENVKQKMNFTFQYPLDNDNDNDYSKNVGKQLPSPNDPSHSAPMPINQTQKKLSDATDSSSATLDSLSNSNDVLNNTPNSSTSMDWLDNVIYTNRFVSGDDGSNSKTKNLDSNMFSNDFNFENQFDEQVSEFCSKMNQVCGTRQCPIPKKPISALDKEVFASSSILSSNSPALTNTWESHSNITDNTPANVTATDATKYENSFSGFGRLGFDMSANHYVVNDNSTGSTDSTGSTDSTGSTGNKNKKNNNNSDDVLPFISESPFDMNQVTNFFSPGSTGIGNNAASNTNPSLLQSSKEDIPFINANLAFPDDNSTNIQLQPFSESQSQNKSDYDMFFRDSSKEGNNLFGEFLEDDDDDKKAANMSDDESSLIKNQLINEEPELPKQYLQSVPGNESEISQKNGSSLQNADKINNGNDNDNDNDVVPSKEGSLLRCSEIWDRITTHPKYSDIDVDGLCSELMAKAKCSERGVVINAEDVQLALNKHMN

SEQ ID NO: 5 - DNA, 1953 bp, Saccharomyces cerevisiae
atgagtgtgtctamcgccaagaggtcgctggatgtcgtttctccgggttcattagcggagtttgagggttcaaaatctcgtcacgatgaaatagaaaatgaacatagacgtactggtacacgtgatggcgaggatagcgagcaaccgaagaagaagggtagcaaaactagcaaaaagcaagatttggatcctgaaactaagcagaagaggactgcccaaaatcgggccgctcaaagagcttttagggaacgtaaggagaggaagatgaaggaattggagaagaaggtacaaagtttagagagtattcagcagcaaaatgaagtggaagctacttttttgagggaccagttaatcactctggtgaatgagttaaaaaaatatagaccagagacaagaaatgactcaaaagtgctggaatatttagcaaggcgagatcctaatttgcatttttcaaaaaataacgttaaccacagcaatagcgagccaattgacacacccaatgatgacatacaagaaaatgttaaacaaaagatgaatttcacgtttcaatatccgcttgataacgacaacgacaacgacaacagtaaaaatgtggggaaacaattaccttcaccaaatgatccaagtcattcggctcctatgcctataaatcagacacaaaagaaattaagtgacgctacagattcctccagcgctactttggattccctttcaaatagtaacgatgttcttaataacacaccaaactcctccacttcgatggattggttagataatgtaatatatactaacaggtttgtgtcaggtgatgatggcagcaatagtaaaactaagaatttagacagtaatatgttttctaatgactttaattttgaaaaccaatttgatgaacaagtttcggagttttgttcgaaaatgaaccaggtatgtggaacaaggcaatgtcccattcccaagaaacccatctcggctcttgataaagaagttttcgcgtcatcttctatactaagttcaaattctcctgctttaacaaatacttgggaatcacattctaatattacagataatactcctgctaatgtcattgctactgatgctactaaatatgaaaattccttctccggttttggccgacttggtttcgatatgagtgccaatcattacgtcgtgaatgataatagcactggtagcactgatagcactggtagcactggcaataagaacaaaaagaacaataataatagcgatgatgtactcccattcatatccgagtcaccgtttgatatgaaccaagttactaatttttttagtccgggatctaccggcatcggcaataatgctgcctctaacaccaatcccagcctactgcaaagcagcaaagaggatataccttttatcaacgcaaatctggctttcccagacgacaattcaactaatattcaattacaacctttctctgaatctcaatctcaaaataagtttgactacgacatgttttttagagattcatcgaaggaaggtaacaatttatttggagagtttttagaggatgacgatgatgamaaaaaagccgctaatatgtcagacgatgagtcaagtttaatcaagaaccagttaattaacgaagaaccagagcttccgaaacaatatctacaatcggtaccaggaaatgaaagcgaaatctcacaaaaaaatggcagtagtttacagaatgctgacaaaatcaataatggcaatgataacgataatgataatgatgtcgttccatctaaggaaggctctttactaaggtgttcggaaatttgggatagaataacaacacatccgaaatactcagatattgatgtcgatggtttatgttccgagctaatggcaaaggcaaaatgttcagaaagaggggttgtcatcaatgcagaagacgttcaattagctttgaataagcatatgaactaa

SEQ ID NO: 6 - protein, 650 aa, Saccharomyces cerevisiae
  misc_feature (5)..(5): Xaa can be any naturally occurring amino acid
  misc_feature (521)..(521): Xaa can be any naturally occurring amino acid
MSVSXAKRSLDVVSPGSLAEFEGSKSRHDEIENEHRRTGTRDGEDSEQPKKKGSKTSKKQDLDPETKQKRTAQNRAAQRAFRERKERKMKELEKKVQSLESIQQQNEVEATFLRDQLITLVNELKKYRPETRNDSKVLEYLARRDPNLHFSKNNVNHSNSEPIDTPNDDIQENVKQKMNFTFQYPLDNDNDNDNSKNVGKQLPSPNDPSHSAPMPINQTQKKLSDATDSSSATLDSLSNSNDVLNNTPNSSTSMDWLDNVIYTNRFVSGDDGSNSKTKNLDSNMFSNDFNFENQFDEQVSEFCSKMNQVCGTRQCPIPKKPISALDKEVFASSSILSSNSPALTNTWESHSNITDNTPANVIATDATKYENSFSGFGRLGFDMSANHYVVNDNSTGSTDSTGSTGNKNKKNNNNSDDVLPFISESPFDMNQVTNFFSPGSTGIGNNAASNTNPSLLQSSKEDIPFINANLAFPDDNSTNIQLQPFSESQSQNKFDYDMFFRDSSKEGNNLFGEFLEDDDDXKKAANMSDDESSLIKNQLINEEPELPKQYLQSVPGNESEISQKNGSSLQNADKINNGNDNDNDNDVVPSKEGSLLRCSEIWDRITTHPKYSDIDVDGLCSELMAKAKCSERGVVINAEDVQLALNKHMN

SEQ ID NO: 7 - protein, 656 aa, Saccharomyces cerevisiae
MSVSTAKRSLDVVSPGSLAEFEGSKSRHDEIENEHRRTGTRDGEDSEQPKKKGSKTSKKQDLDPETKQKRTAQNRAAQRAFRERKERKMKELEKKVQSLESIQQQNEVEATFLRDQLITLVNELKKYRPETRNDSKVLEYLARRDPNLLFSKNNVNHSNSEPIDTPNDDIQENVKQKMNFTFQYPLDNDNDNDDSKNVGKQLPSPNDPSHSAPMPINQTQKKLSDATDSSSATLDSLSNSNDVLNNTPNSSTSMDWLDNVIYTNRFVSGDDGSNSKTKNLDSNMFSNDFNFENQFDEQVSEFCSKMNQVCGTRQCPIPKKPISALDKEVFASSSILSSNSPALTNTWESHSNITDNTPANVIATDATKYENSFSGFGRLGFDMSANHYVVNDNSTGSTDSTDSTGSTGSTGNKNKKNNNNSDDVLPFISESPFDMNQVTNFFSPGSTGIGNNAASNTNPSLLQSSKEDIPFINANLAFPDDNSTNIQLQPFSESQSQNKFDYDMFFRDSSKEGNNLFGEFLEDDDDDKKAANMSDDESSLIKNQLINEEPELPKQYLQSVPGNESEISQKNGSSLQNADKINNGNDNDNDNDVVPSKEGSLLRCSEIWDRITTHPKYSDIDVDGLCSELMAKAKCSERGVVINAEDVQLALNKHMN

SEQ ID NO: 8 - protein, 656 aa, Saccharomyces cerevisiae
MSVSTAKRSLDVVSPGSLAEFEGSKSRHDEIENEHRRTSTRDGEDSEQPKKKGSKTSKKQDLDPETKQKRTAQNRAAQRAFRERKERKMKELEKKVQSLESIQQQNEVEATFLRDQLITLVNELKKYRPETRNDSKVLEYLARRDPNLHFSKNNVNHSNSEPIDTPNDDIQENVKQKMNFTFQYPLDNDNDNDYSKNVGKQLPSPNDPSHSAPMPINQTQKKLSDATDSSSATLDSLSNSNDVLNNTPNSSTSMDWLDNVIYTNRFVSGDDGSNSKTKNLDSNMFSNDFNFENQFDEQVSEFCSKMNQVCGTRQCPIPKKPISALDKEVFASSSILSSNSPALTNTWESHSNITDNTPANVTATDATKYENSFSGFGRLGFDMSANHYVVNDNSTGSTDSTGSTDSTGSTGNKNKKNNNNSDDVLPFISESPFDMNQVTNFFSPGSTGIGNNAASNTNPSLLQSSKEDIPFINANLAFPDDNSTNIQLQPFSESQSQNKFDYDMFFRDSSKEGNNLFGEFLEDDDDDKKAANMSDDESSLIKNQLINEEPELPKQYLQSVPGNESEISQKNGSSLQNADKINNGNDNDNDNDVVPSKEGSLLRCSEIWDRITTHPKYSDIDVDGLCSELMAKAKCSERGVVINAEDVQLALNKHMN

SEQ ID NO: 9 - protein, 523 aa, Saccharomyces cerevisiae
  misc_feature (149)..(149): Xaa can be any naturally occurring amino acid
MSVSTAKRSLDVVSPGSLAEFEGSKSRHDEIENEHRRTGTRDGEDSEQPKKKGSKTSKKQDLDPETKQKRTAQNRAAQRAFRERKERKMKELEKKVQSLESIQQQNEVEATFLRDQLITLVNELKKYRPETRNDSKVLEYLARRDPNLXFSKNNVNHSNSEPIDTPNDDIQENVKQKMNFTFQYPLDNDNDNDDSKNVGKQLPSPNDPSHSAPMPINQTQKKLSDATDSSSATLDSLSNSNDVLNNTPNSSTSMDWLDNVIYTNRFVSGDDGSNSKTKNLDSNMFSNDFNFENQFDEQVSEFCSKMNQVCGTRQCPIPKKPISALDKEVFASSSILSSNSPALTNTWESHSNITDNTPANVIATDATKYENSFSGFGRLGFDMSANHYVVNDNSTGSTDSTDSTGSTGSTGNKNKKNNNNSDDVLPFISESPFDMNQVTNFFSPGSTGIGNNAASNTNPSLLQSSKEDIPFINANLAFPDDNSTNIQLQPFSESQSQNKFDYDMFFRDSSKEGNNLFGEFFRG

SEQ ID NO: 10 - protein, 600 aa, Saccharomyces cerevisiae
  misc_feature (149)..(149): Xaa can be any naturally occurring amino acid
MSVSTAKRSLDVVSPGSLAEFEGSKSRHDEIENEHRRTGTRDGEDSEQPKKKGSKTSKKQDLDPETKQKRTAQNRAAQRAFRERKERKMKELEKKVQSLESIQQQNEVEATFLRDQLITLVNELKKYRPETRNDSKVLEYLARRDPNLXFSKNNVNHSNSEPIDTPNDDIQENVKQKMNFTFQYPLDNDNDNDDSKNVGKQLPSPNDPSHSAPMPINQTQKKLSDATDSSSATLDSLSNSNDVLNNTPNSSTSMDWLDNVIYTNRFVSGDDGSNSKTKNLDSNMFSNDFNFENQFDEQVSEFCSKMNQVCGTRQCPIPKKPISALDKEVFASSSILSSNSPALTNTWESHSNITDNTPANVIATDATKYENSFSGFGRLGFDMSANHYVVNDNSTGSTDSTDSTGSTGSNKNKKNNNNSDDVLPFISESPFDMNQVTNFFSPGSTGIGNNAASNTNPSLLQSSKEDIPFINANLAFPDDNSTNIQLQPFSESQSQNKFDYDMFFRDSSKEGNNLFGEFLEDDDDDKKAANMSDDESSLIKNQLINEEPELPKQYLQSVPGNEKRNLTKKMAVVCRMLTRSIMAMITIMITMSFHLRKALY

SEQ ID NO: 11 - protein, 650 aa, Saccharomyces cerevisiae
MSVSTAKRSLDVVSPGSLAEFEGSKSRHDEIENEHRRTGTRDGEDSEQPKKKGSKTSKKQDLDPETKQKRTAQNRAAQRAFRERKERKMKELEKKVQSLESIQQQNEVEATFLRDQLITLVNELKKYRPETRNDSKVLEYLARRDPNLHFSKNNVNHSNSEPIDTPNDDIQENVKQKMNFTFQYPLDNDNDNDNSKNVGKQLPSPNDPSHSAPMPINQTQKKLSDATDSSSATLDSLSNSNDVLNNTPNSSTSMDWLDNVIYTNRFVSGDDGSNSKTKNLDSNMFSNDFNFENQFDEQVSEFCSKMNQVCGTRQCPIPKKPISALDKEVFASSSILSSNSPALTNTWESHSNITDNTPANVIATDATKYENSFSGFGRLGFDMSANHYVVNDNSTGSTDSTGSTGNKNKKNNNNSDDVLPFISESPFDMNQVTNFFSPGSTGIGNNAASNTNPSLLQSSKEDIPFINANLAFPDDNSTNIQLQPFSESQSQNKFDYDMFFRDSSKEGNNLFGEFLEDDDDDKKAANMSDDESSLIKNQLINEEPELPKQYLQSVPGNESEISQKNGSSLQNADKINNGNDNDNDNDVVPSKEGSLLRCSEIWDRITTHPKYSDIDVDGLCSELMAKAKCSERGVVINAEDVQLALNKHMN

SEQ ID NO: 12 - protein, 409 aa, Saccharomyces cerevisiae
MGNILRKGQQIYLAGDMKKQMLLNKDGTPKRKVGRPGRKRIDSEAKSRRTAQNRAAQRAFRDRKEAKMKSLQERVELLEQKDAQNKTTTDFLLCSLKSLLSEITKYRAKNSDDERILAFLDDLQEQQKRENEKGTSTAVSKAAKELPSPNSDENMTVNTSIEVQPHTQENEKVMWNIGSWNAPSLTNSWDSPPGNRTGAVTIGDESINGSEMPDFSLDLVSNDRQTGLEALDYDIHNYFPQHSERLTAEKIDTSACQCEIDQKYLPYETEDDTLFPSVLPLAVGSQCNNICNRKCIGTKPCSNKEIKCDLITSHLLNQKSLASVLPVAASHTKTIRTQSEAIEHISSAISNGKASCYHILEEISSLPKYSSLDIDDLCSELIIKAKCTDDCKIVVKARDLQSALVRQLL

SEQ ID NO: 13 - protein, 569 aa, Saccharomyces cerevisiae
MKLKTVRSAVLSSLFASQVLGKIIPAANKRDDDSNSKFVKLPFHKLYGDSLENVGSDKKPEVRLLKRADGYEEIIITNQQSFYSVDLEVGTPPQNVTVLVDTGSSDLWIMGSDNPYCSSNSMGSSRRRVIDKRDDSSSGGSLINDINPFGWLTGTGSAIGPTATGLGGGSGTATQSVPASEATMDCQQYGTFSTSGSSTFRSNNTYFSISYGDGTFASGTFGTDVLDLSDLNVTGLSFAVANETNSTMGVLGIGLPELEVTYSGSTASHSGKAYKYDNFPIVLKNSGAIKSNTYSLYLNDSDAMHGTILFGAVDHSKYTGTLYTIPIVNTLSASGFSSPIQFDVTINGIGISDSGSSNKTLTTTKIPALLDSGTTLTYLPQTVVSMIATELGAQYSSRIGYYVLDCPSDDSMEIVFDFGGFHINAPLSSFILSTGTTCLLGIIPTSDDTGTILGDSFLTNAYVVYDLENLEISMAQARYNTTSENIEIITSSVPSAVKAPGYTNTWSTSASIVTGGNIFTVNSSQTASFSGNLTTSTASATSTSSKRNVGDHIVPSLPLTLISLLFAFI

SEQ ID NO: 14 - protein, 295 aa, Saccharomyces cerevisiae
MLMQIKMDNHPFNFQPILASHSMTRDSTKPKKMTDTAFVPSPPVGFIKEENKADLHTISVVASNVTLPQIQLPKIATLEEPGYESRTGSLTDLSGRRNSVNIGALCEDVPNTAGPHIARPVTINNLIPPSLPRLNTYQLRPQLSDTHLNCHFNSNPYTTASHAPFESSYTTASTFTSQPAASYFPSNSTPATRKNSATTNLPSEERRRVSVSLSEQVFNEGERYNNDGQLIGKTGKPLRNTKRAAQNRSAQKAFRQRREKYIKNLEEKSKLFDGLMKENSELKKMIESLKSKLKE

SEQ ID NO: 15 - protein, 245 aa, Saccharomyces cerevisiae
MALPLIKPKESEESHLALLSKIHVSKNWKLPPRLPHRAAQRRKRVHRLHEDYETEENDEELQKKKRQNRDAQRAYRERKNNKLQVLEETIESLSKVVKNYETKLNRLQNELQAKESENHALKQKLETLTLKQASVPAQDPILQNLIENFKPMKAIPIKYNTAIKRHQHSTELPSSVKCGFCNDNTTCVCKELETDHRKSDDGVATEQKDMSMPHAECNNKDNPNGLCSNCTNIDKSCIDIRSIIH

SEQ ID NO: 16 - protein, 383 aa, Saccharomyces cerevisiae
MQNPPLIRPDMYNQGSSSMATYNASEKNLNEHPSPQIAQPSTSQKLPYRINPTTTNGDTDISVNSNPIQPPLPNLMHLSGPSDYRSMHQSPIHPSYIIPPHSNERKQSASYNRPQNAHVSIQPSVVFPPKSYSISYAPYQINPPLPNGLPNQSISLNKEYIAEEQLSTLPSRNTSVTTAPPSFQNSADTAKNSADNNDNNDNVTKPVPDKDTQLISSSGKTLRNTRRAAQNRTAQKAFRQRKEKYIKNLEQKSKIFDDLLAENNNFKSLNDSLRNDNNILIAQHEAIRNAITMLRSEYDVLCNENNMLKNENSIIKNEHNMSRNENENLKLENKRFHAEYIRMIEDIENTKRKEQEQRDEIEQLKKKIRSLEEIVGRHSDSAT

SEQ ID NO: 17 - protein, 245 aa, Saccharomyces cerevisiae
MRQRRSVVAVSVKPKGFKLGHKQGSMSTTSPPPSSPDGNVSTSGPSAIKLSKNWELPQRLKPGRKPKSKRGDASANNDGSSKIKKVQTSNQKDQMTTKDHENEGAKGHEGKSDDEGNGSGDENGVDSVEKRRRQNRDAQRAYRERRTTRIQVLEEKVEMLHNLVDDWQRKYKLLESEFSDTKENLQKSIALNNELQKALPLIVNTPFQQQPENPPDNPISILEMVENFKPIGAVSLKKGKLKAHC

SEQ ID NO: 18 - protein, 294 aa, Saccharomyces cerevisiae
MAKPRGRKGGRKPSLTPPKNKRAAQLRASQNAFRKRKLERLEELEKKEAQLTVTNDQIHILKKENELLHFMLRSLLTERNMPSDERNISKACCEEKPPTCNTLDGSVVLSSTYNSLEIQQCYVFFKQLLSVCVGKNCTVPSPLNSFDRSFYPIGCTNLSNDIPGYSFLNDAMSEIHTFGDFNGELDSTFLEFSGTEIKEPNNFITENTNAIETAAASMVIRQGFHPRQYYTVDAFGGDVLLSAMDIWSFMKVHPKVNTFDLEILGTELKKSATCSNFDILISLKHFIKVFSSKL

SEQ ID NO: 19 - DNA, 1953 bp, Artificial Sequence
  B5-1 variant
ttagttcatatgcttattcaaagctaattgaacgtcttctgcattgatgacaacccctctttctgaacattttgcctttgccattagctcggaacataaaccatcgacatcaatatctgagtatttcggatgtgttgttattctatcccaaatttccgaacaccttagtaaagagccttccttagatggaacgacatcattatcattatcgttatcattgccattattgattttgtcagcattctgtaaactactgccatttttttgtgagatttcgctttcatttcctggtaccgattgtagatattgtttcggaagctctggttcttcgttaattaactggttcttgattaaacttgactcatcgtctgacatattagcggcctttttgtcatcatcgtcatcctctaaaaactctccaaataaattgttaccttccttcgatgaatctctaaaaaacatgtcgtagtcaaacttattttgagattgagattcagagaaaggttgtaattgaatattagttgaattgtcgtctgggaaagccagatttgcgttgataaaaggtatatcctctttgctgctttgcagtaggctgggattggtgttagaggcagcattattgccgatgccggtagatcccggactaaaaaaattagtaacttggttcatatcaaacggtgactcggatatgaatgggagtacatcatcgctattattattgttctttttgttcttattgccagcgctaccagtgctatcagtgctaccagtgctattatcattcacgacgtaatgattggcactcatatcgaaaccaagtcggccaaaaccggagaaggaattttcatatttagtagcatcagtagcaatgacattagcaggagtattatctgtaatattagaatgtgattcccaagtatttgttaaagcaggagaatttgaacttagtatagaagatgacgcgaaaacttctttatcaagagccgagatgggtttcttgggaatgggacattgccttgttccacatacctggttcattttcgaacaaaactccgaaacttgttcatcaaattggttttcaaaattaaagtcattagaaaacatattactgtctaaattcttagttttactattgctgccatcatcacctgacacaaacctgttagtatatattacattatctaaccaatccaccgaagtggaggagtttggtgtgttattaagaacatcgttactatttgaaagggaatccaaagtagcgctggaggaatctgtagcgtcacttaatttcttttgtgtctgatttataggcataggagccgaatgacttggatcatttggtgaaggtaattgtttccccacatttttactgttgtcgttgtcgttgtcgttatcaagcggatattgaaacgtgaaattcatcttttgtttaacattttcttgtatgtcatcattgggtgtgtcaattggctcgctattgctgtggttaacgttattttttgaaaaatgcaaattaggatctcgccttgctaaatattccagcacttttgagtcatttcttgtctctggtctatatttttttaactcattcaccagagtgattaactggtccctcaaaaaagtagcttccacttcattttgctgctgaatactctctaaactttgtaccttcttctccaattccttcatcttcctctccttacgttccctaaaagctctttgagcggcccgattttgggcagtcctcttctgcttagtttcaggatccaaatcttgctttttgctagttttgctacccttcttcttcggttgctcgctatcctcgccatcacgtgtaccagtacgtctatgttcattttctatttcatcgtgacgagattttgaaccctcaaactccgctaatgaacccggagaaacgacatccagcgacctcttggcggtagacacactcat

SEQ ID NO: 20 - DNA, 1953 bp, Artificial Sequence
  B5-4 variant
ttagttcatatgcttattcaaagctaattgaacgtcttctgcattgatgacaacccctctttctgaacattttgcctttgccattagctcggaacataaaccatcgacatcaatatctgagtatttcggatgtgttgttattctatcccaaatttccgaacaccttagtaaagagccttccttagatggaacgacatcattatcattatcgttatcattgccattattgattttgtcagcattctgtaaactactgccatttttttgtgagatttcgctttcatttcctggtaccgattgtagatattgtttcggaagctctggttcttcgttaattaactggttcttgattaaacttgactcatcgtctgacatattagcggcttttttgtcatcatcgtcatcctctaaaaactctccaaataaattgttaccttccttcgatgaatctctaaaaaacatgtcgtagtcaaacttattttgagattgagattcagagaaaggttataattgaatattagttgaattgtcgtctgggaaagccagatttgcgttgataaaaggtatatcctctttgctgctttgcagtaggctgggattggtgttagaggcagcattattgcagatgccggtagatcccggactaaaaaaattagtaacttggttcatatcaaacggtgactcggatatgaatgggagtacatcatcgctattattattgttctttttgttcttattgccagtgctaccagtgctatcagtgctaccagtgctattatcattcacgacgtaatgattggcactcatatcgaaaccaagtcggccaaaaccggagaaggaattttcatatttagtagcatcagtagcaatgacattagcaggagtattatctgtaatattagaatgtgattcccaagtatttgttaaagcaggagaatttgaacttagtatagaagatgacgcgaaaacttctttatcaagagccgagatgggtttcttgggaatgggacattgccttgttccacatacctggttcattttcgaacaaaactccgaaacttgttcatcaaattggttttcaaaattaaagtcattagaaaacatattactgtctaaattcttagttttactattgctgccatcatcacctgacacaaacctgttagtatatattacattatctaaccaatccatcgaagtggaggagtttggtgtgttattaagaacatcgttactatttgaaagggaatccaaagtagcgctggaggaatctgtagcgtcacttaatttcttttgtgtctgatttataggcataggagccgaatgacttggatcatttggtgaaggtaattgtttccccacatttttactgttgtcgttgtcgttgtcgttatcaagcggatattgaaacgtgaaattcatcttttgtttaacattttcttgtatgtcatcattgggtgtgtcaattggctcgctattgctgtggttaacgttattttttgaaaaatgcaaattaggatctcgccttgctaaatattccagcacttttgagtcatttcctgtctctggtctatatttttttaactcattcaccagagtgattaactggtccctcaaaaaagtagcttccacttcattttgctgctgaatactctctaaactttgtaccttcttctccaattccttcatcttcctctccttacgttccctaaaaactctttgagcggcccgattttgggcagtcctcttctgcttagtttcaggatccaaatcttgctttttgctagttttgctacccttcttcttcggttgctcgctatcctcgccatcacgtgtaccagtacgcctatgttcattttctatttcatcgtgacgagattttgaaccctcaaactccgctaatgaacccggagaaacgacatccagcgacctcttggcggtagacacactcat

SEQ ID NO: 21 - DNA, 1953 bp, Artificial Sequence
  B8-1 variant
ttagttcatatgcttattcaaagctaattgaacgtcttctgcattgatgacaacccctctttctgaacattttgcctttgccattagctcggaacataaaccatcgacatcaatatctgagtatttcggatgtgttgttattctatcccaaatttccgaacaccttagtaaagagccttccttagatggaacgacatcattatcattatcgttatcattgccattattgattttgtcagcattctgtaaactactgccatttttttgtgagatttcgctttcatttcctggtaccgattgtagatattgtttcggaagctctggttcttcgttaattaactggttcttgattaaacttgactcatcgtctgacatattagcggcttttttgtcatcatcgtcatcctctaaaaactctccaaataaattgttaccttccttcgatgaatctctaaaaaacatgtcgtagtcaaacttattttgagattgagattcagagaaaggttgtaattgaatattagttgaattgtcgtctgggaaagccagatttgcgttgataaaaggtatatcctctttgctgctttgcagtaggctgggattggtgttagaggcagcattattgccgatgccggtagatcccggactaaaaaaattagtaacttggttcatatcaaacggtgactcggatatgaatgggagtacatcatcgctattattattgttctttttgttcttattgccagtgctaccagtgctatcagtgctaccagtgctattatcattcacgacgtaatgattggcactcatatcgaaaccaagtcggccaaaaccggagaaggaattttcatatttagtagcatcagtagcaatgacattagcaggagtattatctgtaatattagaatgtgattcccaagtatttgttaaagcaggagaatttgaacttagtatagaagatgacgcgaaaacttctttatcaagagccgagatgggtttcttgggaatgggacattgccttgttccacatacctggttcattttcgaacaaaactccgaaacttgttcatcaaattggttttcaaaattaaagtcattagaaaacatattactgtctaaattcttagttttactattgctgccatcatcacctgacacaaacctgttagtatatattacattatctaaccaatccatcgaagtggaggagtttggtgtgttattaagaacatcgttactatttgaaagggaatccaaagtagcgctggaggaatctgtagcgtcacttaatttcttttgtgtctgatttataggcataggagccgaatgacttggatcatttggtgaaggtaattgtttccccacatttttactgttgtcgttgtcgttgtcgttatcaagcggatattgaaacgtgaaattcatcttttgtttaacattttcttgtatgtcaccattgggtgtgtcaattggctcgctattgctgtggttaacgttattttttgaaaaatgcaaattaggatctcgccttgctaaatattccagcacttttgagtcatttcttgtctctggtctatatttttttaactcattcaccagagtgattaactggtccctcaaaaaagtagcttccacttcattttgctgctgaatactctctaaactttgtaccttcttctccaattccttcatcttcctctccttacgttccctaaaagctctttgagcggcccgattttgggcagtcctcttctgcttagtttcaggatccaaatcttgctttttgctagttttgctacccttcttcttcggttgctcgctatcctcgccatcacgtgtaccagtacgtctatgttcattttctatttcatcgtgacgagattttgaaccctcaaactccgctaatgaacccggagaaacgacatccagcgacctcttggcggtagacacactcat

SEQ ID NO: 22 - DNA, 1953 bp, Artificial Sequence
  B8-4 variant
ttagttcatatgcttattcaaagctaattgaacgtcttctgcattgatgacaacccctctttctgaacattttgcctttgccattagctcggaacataaaccattgacatcaatatctgagtatttcggatgtgttgttattctatcccaaatttccgaacaccttagtaaagagccttccttagatggaacgacatcattatcattatcgttatcattgccattattgattttgtcagcattctgtaaactactgccatttttttgtgagatttcgctttcatttcctggtaccgattgtagatattgtttcggaagctctggttcttcgttaattaactggttcttgattaaacttgactcatcgtctgacatattagcggcttttttgtcatcatcgtcatcctctaaaaactctccaaataaattgttaccttccttcgatgaatctctaaaaaacatgtcgtagtcaaacttattttgagattgagatttagagaaaggttgtaattgaatattagttgaattgtcgtctgggaaagccagatttgcgttgataaaaggtatatcctctttgctgctttgcagtaggctgggattggtgttagaggcagcattattgccgatgccggtagatcccggactaaaaaaattagtaacttggttcatatcaaacggtgactcggatatgaatgggagtacatcatcgctattattattgttctttttgttcttattgccagtgctaccagtgctatcagtgctaccagtgctattatcattcacgacgtaatgattggcactcatatcgaaaccaagtcggccaaaaccggagaaggaattttcatatttagtagcatcagtagcaatgacattagcaggagtattatctgtaatattagaatgtgattcccaagtatttgttaaagcaggagaatttgaacttagtatagaagatgacgcgaaaacttctttatcaagagccgagatgggtttcttgggaatgggacattgccttgttccacatacctggttcattttcgaacaaaactccgaaacttgttcatcaaattggttttcaaaattaaagtcattagaaaacatattactgtctaaattcttagttttactattgctgccatcatcacctgacacaaacctgttagtatatattacattatctaaccaatccatcgaagtggaggagtttggtgtgttattaagaacatcgttactatttgaaagggaatccaaagtagcgctggaggaatctgtagcgtcacttaatttcttttgtgtctgatttataggcataggagccgaatgacttggatcatttggtgaaggtaattgtttccccacatttttactgttgtcgttgtcgttgtcgttatcaagcggatattgaaacgtgaaattcatcttttgtttaacattttcttgtatgtcatcattgggtgtgtcaattggctcgctattgctgtggttaacgttattttttgaaaaatgcaaattaggatctcgccttgctaaatattccagcacttttgagtcatttcttgtctctggtctatatttttttaactcattcaccagagtgattaactggtccctcaaaaaagtagcttccacttcattttgctgctgaatactctctaaactttgtaccttcttctccaattccttcatcttcctctccttacgttccctaaaagctctttgagcggcccgattttgggcagtcctcttctgcttagtttcaggatccaaatcttgctttttgctagttttgctacccttcttcttcggttgctcgctatcctcgccatcacgtgtaccagtacgtctatgttcattttctatttcatcgtgacgagattttgaaccctcaaactccgctaatgaacccggagaaacgacatccagcgacctcttggcggtagacacactcat

SEQ ID NO: 23 - DNA, 1953 bp, Artificial Sequence
  C5-2 variant
atgagtgtgtctaccgccaagaggtcgctggatgtcgtttctccgggttcattagcggagtttgagggttcaaaatctcgtcacgatgaaatagaaaatgaacatagacgtactggtacacgtgatggcgaggatagcgagcaaccgaagaagaagggtagcaaaactagcaaaaagcaagatttggatcctgaaactaagcagaagaggactgcccaaaatcgggccgctcaaagagcttttagggaacgtaaggagaggaagatgaaggaattggagaagaaggtacaaagtttagagagtattcagcagcaaaatgaagtggaagctacttttttgagggaccagttaatcactctggtgaatgagttaaaaaaatacagaccagagacaagaaatgactcaaaagtgctggaatatttagcaaggcgagatcctaatttgcatttttcaaaaaataacgttaaccacagcaatagcgagccaattgacacacccaatgatgacatacaagaaaatgttaaacaaaagatgaatttcacgtttcaatatccgcttgataacgacaacgacaacgacaacagtaaaaatgtggggaaacaattaccttcaccaaatgatccaagtcactcggctcctatgcctataaatcagacacaaaagaaattaagtgacgctacagattcctccagcgctactttggattccttttcaaatagtaacgatgttcttaataacacaccaaactcctccacttcgatggattggttagataatgtaatatatactaacaggtttgtgtcaggtgatgatggcagcaatagtaaaactaagaatttagacagtaatatgttttctaatgactttaattttgaaaaccaatttgataaacaagtttcggagttttgttcgaaaatgaaccaggtatgtggaacaaggcaatgtcccattcccaagaaacccatctcggctcttgataaagaagttttcgcgtcatcttctatactaagttcaaattctcctgctttaacaaatacttgggaatcacattctaatattacagataatactcctgctaatgtcattgctactgatgctattaaatatgaaaattccttctccggttttggccgacttggtttcgatatgagtgccaatcattacgtcgtgaatgataatagcactggtagcactgatagcactggtagcactggcaataagaacaaaaagaacaataataatagcgatgatgtactcccattcatatccgagtcgccgtttgatatgaaccaagttactaatttttttagtccgggatctaccggcatcggcaataatgctgcctctaacaccaatcccagcctactgcaaagcagcaaagaggatataccttttatcaacgcaaatctggctttcccagacgacaattcaactaatattcaattacaacctttctctgaatctcaatctcaaaataagtttgactacgacatgctttttagagattcatcgaaggaaggtaacaatttatttggagagtttttagaggatgacgatgatgacaaaaaagccgctaatatgtcagacgatgagtcaagtttaatcaagaaccagttaattaacgaagaaccagagcttccgaaacaatatctacaatcggtaccaggaaatgaaagcgaaatctcacaaaaaaatggcagtagtttacagaatgctgacaaaatcaataatggcaatgataacgataatgataatgatgtcgttccatctaaggaaggctctttactaaggtgttcggaaatttgggatagaataacaacacatccgaaatactcagatattgatgtcgatggtttatgttccgagctaatggcaaaggcaaaatgttcagaaagaggggttgtcatcaatgcagaagacgttcaattagctttgaacaagcatatgaactaa

SEQ ID NO: 24 - DNA, 1953 bp, Artificial Sequence
  C5-3 variant
atgagtgtgtctaccgccaagaggtcgctggatgtcgtttctccgggttcattagcggagtttgagggttcaaaatctcgtcacgatgaaatagaaaatgaacatagacgtactggcacacgtgatggcgaggatagcgagcaaccgaagaagaagggtagcaaaactagcaaaaagcaagatttggatcctgaaactaagcagaagaggactgcccaaaatcgggccgctcaaagagcttttagggaacgtaaggagaggaagatgaaggaattggagaagaaggtacaaagtttagagagtattcagcagcaaaatgaagtggaagctacttttttgagggaccagttaatcactctggtgaatgagttaaaaaaatatagaccagagacaagaaatgactcaaaagtgctggaatatttagcaaggcgagatcctaatttgcatttttcaaaaaataacgttaaccacagcaatagcgagccaattgacacacccaatgatgacatacaagaaaatgttaaacaaaagatgaatttcacgtttcaatatccgcttgataacgacaacgacaacgacaacagtaaaaatgtggggaaacaattaccttcaccaaatgatccaagtcattcggctcctatgcctataaatcagacacaaaagaaattaagtgacgctacagattcctccagcgctactttggattccctttcaaatagtaacgatgttcttaataacacaccaaactcctccacttcgatggattggttagataatgtaatatatactaacaggtttgtgtcaggtgatgatggcagcaatagtaaaactaagaatttagacagtaatatgttttctaatgactttaattttgaaaaccaatttgatgaacaagtttcggagttttgttcgaaaatgaaccaggtatgtggaacaaggcaatgtcccattcccaagaaacccatctcggctcttgataaagaagttttcgcgtcatcttctatactaagttcaaattctcctgctttaacaaatacttgggaatcacattctaatattacagataatactcctgctaatgtcattgctactgatgctactaaatatgaaaattccttctccggttttggccgacttggtttcgatatgagtgccaatcattacgtcgtgaatgataatagcactggtagcactgatagcactggtagcactggcaataagaacaaaaagagcaataataatagcgatgatgtactcccattcatatccgagtcaccgtttgatatgaaccaagttactaatttttttagtccgggatctaccggcatcggcaataatgctgcctctaacaccaatcccagcctactgcaaagcagcaaagaggatataccttttatcaacgcaaatctggctttcccagacgacaattcaactaatattcaattacaacctttctctgaatctcaatctcaaaataagtttgactacgacatgttttttagagattcatcgaaggaaggtaacaatttatttggagagtttttagaggatgacgatgatgacaaaaaagccgctaatatgtcagacgatgagtcaagtttaatcaagaaccagttaattaacgaagaaccagagcttccgaaacaatatctacaatcggtaccaggaaatgaaagcgaaatctcacaaaaaaatggcagtagtttacagaatgccgacaaaatcaataatggcaatgataacgataatggtaatgatgtcgttccatctaaggaaggctctttactaaggtgttcggaaatttgggatagaataacaacacatccgaaatactcagatattgatgtcgatggtttatgttccgagctaatggcaaaggcaaaatgttcagaaagaggggttgtcgtcaatgcagaagacgttcaattagctttgaataagcatatgaactaa

SEQ ID NO: 25 - DNA, 1953 bp, Artificial Sequence
  D8-4 variant
ttagttcatatgcttattcaaagctaattgaacgtcttctgcattgatgacaacccctctttctgaacattttgcctttgccattagctcggaacataaaccatcgacatcaatatctgagtatttcggatgtgttgttattctatcccaaatttccgaacaccttagtaaagagccttccttagatggaacgacatcattatcattatcgttatcattgccattattgattttgtcagcattctgtaaactactgccatttttttgtgagatttcgctttcatttcctggtaccgattgtagatattgtttcggaagctctggttcttcgttaattaactggttcttgattaaacttgactcatcgtctgacatattagcggcttttttgtcatcatcgtcatcctctaaaaactctccaaataaattgttaccttccttcgatgaatctctaaaaaacatgtcgtagtcaaacttattttgagattgagattcagagaaaggttgtaattgaatattagttgaattgtcgtctgggaaagccagatttgcgttgataaaaggtatatcctctttgctgctttgcagtaggctgggattggtgttagaggcagcattattgccgatgccggtagatcccggactaaaaaaattagtaacttggttcatatcaaacggtgactcggatatgaatgggagtacatcatcgctattattattgttctttttgttcttattgccagtgctaccagtgctatcagtgctaccagtgctattatcattcacgacgtaatgattggcactcatatcgaaaccaagtcggccaaaaccggagaaggaattttcatatttagtagcatcagtagcaatgacattagcaggagtattatctgtaatattagaatgtgattcccaagtatttgttaaagcaggagaatttgaacttagtatagaagatgacgcgaaaacttctttatcaagagccgagatgggtttcttgggaatgggacattgccttgttccacatacctggttcattttcgaacaaaactccgaaacttgttcatcaaattggttttcaaaattaaagtcattagaaaacatattactgtctaaattcttagttttactattgctgccatcatcacctgacacaaacctgttagtatatattacattatctgaccaatccatcgaagtggaggagtttggtgtgttattaagaacatcgttactatttgaaagggaatccaaagtagcgctggaggaatctgtagcgtcacttaatttcttttgtgtctgatttataggcataggagccgaatgacttggatcatttggtgaaggtaattgtttccccacatttttactgttgtcgttgtcgttgtcgttatcaagcggatattgaaacgtgaaattcatcttttgtttaacattttcttgtatgtcatcattgggtgtgtcaattggctcgctattgctgtggttaacgttattttttgaaaaatgcaaattaggatctcgccttgctaaatattccagcacttttgagtcatttcttgtctctggtctatatttttttaactcattcaccagagtgattaactggtccctcaaaaaagtagcttccacttcattttgctgctgaatactctctaaactttgtaccttcttctccaattccttcatcttcctctccttacgttccctaaaagctctttgagcggcccgattttgggcagtcctcttctgcttagtttcaggatccaaatcttgctttttgctagttttgctacccttcttcttcggttgctcgctatcctcgccatcacgtgtaccagtacgtctatgttcattttctatttcatcgtgacgagattttgaaccctcaaactccgctaatgaacccggagaaacgacatccagcgacctcttggcggtagacacactcat

SEQ ID NO: 26 - DNA, 1953 bp, Artificial Sequence
  E5-4 variant
atgagtgtgtctaccgccaagaggtcgctggatgtcgtttctccgggttcattagcggagtttgagggttcaaaatctcgtcacgatgaaatagaaaatgaacatagacgtactggtacacgtgatggcgaggatagcgagcaaccgaagaagaagggtagcaaaactagcaaaaagcaagatttggatcctgaaactaagcagaagaggactgcccaaaatcgggccgctcaaagagcttttagggaacgtaaggagaggaagatgaaggaattggagaagaaggtacaaagtttagagagtattcagcagcaaaatgaagtggaagctacttttttgagggaccagttaatcactctggtgaatgagttaaaaaaatatagaccagagacaagaaatgactcaaaagtgctggaatatttagcaaggcgagatcctaatttgcatttttcaaaaaataacgttaaccacagcaatagcgagccaattgacacacccaatgatgacatacaagaaaatgttaaacaaaagatgaatttcacgtttcaatatccgcttgataacgacaacgacaacgacaacagtaaaaatgtggggaaacaattaccttcaccaaatgatccaagtcattcggctcctatgcctataaatcagacacaaaagaaattaagtgacgctacagattcctccagcgctactttggattccctttcaaatagtaacgatgtccttaataacacaccaaactcctccacttcgatggattggttagataatgtaatatatactaacaggtttgtgtcaggtgatgatggcagcaatagtaaaactaagaatttagacagtaatatgttttctaatgactttaattttgaaaaccaatttgatgaacaagtttcggagctttgttcgaaaatgaaccaggtatgtggaacaaggcaatgtcccattcccaagaaacccatctcggctcttgataaagaagttttcgcgtcatcttctatactaagttcaaattctcctgctttaacaaatacttgggaatcacattctaatattacagataatactcctgctaatgtcattgctactgatgctactaaatatgaaaattccttctccggttttggccgacttggtttcgatatgagtgccaatcattacgtcgtgaatgataatagcactggtagcactgatagcactggtagcactggcaataagaacaaaaagaacaataataatagcgatgatgtactcccattcatatccgagtcaccgtttgatatgaaccaagttactaatttttttagtccgggatctaccggcatcggcaataatgctgcctctaacaccaatcccagcctactgcaaagcagcaaagaggatataccttttatcaacgcaaatctggctttcccagacgacaattcaactaatattcaattacaacctttctctgaatctcaatctcaaaataagtttgactacgacacgttttttagagattcatcgaaggaaggtaacaatttatttggagagtttttagaggatgacgatgatgacaaaaaagccgctaatatgtcagacgatgagtcaagtttaatcaagaaccagttaattaacgaagaaccagagcttccgagacaatatctacaatcggtaccaggaaatgaaagcgaaatctcacaaaaaaatggcagtagtttacagaatgctgacaaaatcaataatggcaatgataacgataatgataatgatgtcgttccatctaaggaaggctctctactaaggtgttcggaaatttgggatagaataacaacacatccgaaatactcagatattgatgtcgatggtttatgttccgagctaatggcaaaggcaaaatgttcagaaagaggggttgtcatcaatgcagaagacgttcaattagctttgaataagcatatgaactaa

SEQ ID NO: 27 - DNA, 1953 bp, Artificial Sequence; identical to SEQ ID NO: 26
  F8-1 variant

SEQ ID NO: 28 - DNA, 2025 bp, Saccharomyces cerevisiae
atggaaccaattgatgacttactttttgaggttactgatgcgttcaaaactcagaaggaggatcttcttgagttggtaacattgattgatatatatggcgagcaagttaaccaagaggggagctatgaagaaaagacgagattcattgaaactttgaatacattgttagaggataatccgagtactactggtgaaatcggttgggatctgcctaagggattattgaagttcttgtcaaaggataatgtcgatgtaaatggaagactaggtacgaatatgattgtccaaggtgtaatgaagtgtttctatgccatctcaatccaaggcgagcccaaaaaatgtttaattactgggttggagttgctttcatccctttgttcaaaagatttttccaagagtgatcaacagaataaggaagactttgttgataaaaaggccaatacgttacctcctgaaggagtgatcgaaaattcctctaatcgaaaagattttccatcctacggtgaaagcaagagttcaaatgaatttttcttgaagttgaaatcctacattttatttgaattcataggggcgagtctgaaaaggatttctactctgtttccttcgaaatatctgggagctgctgtgtcaacaattgagaaatttgtgtatagtcatgcggacacttttgaagatgcccttttccttcttcgtagggtgtacacattctgcaggaactatattccccctgatccaccaaaagatatacaattgaacgaagattttactcgagagatgtttgataaagttgtggaggaagaaagtgaattacaggttagactattgcgtaggctttgtacttttggtatttcgacacccataaaaactgtcaccaccaatgccgacgtgaaatactattgtgcactaaatcaacagaagtttgaattatctgcatattacaccgaatatcttgagctattttgcaggtattaccaaatggcgttctcgcttgatgttgatatagagggagaatttcagaatgtgataaaagaatgtaggattatttataagtctgtaccccaggagatttctgctgttaatgatgaagcgaagttggttttggaaagaatggtatataaattggcttatacattcgaagtacaaaaggccgctaaagaaaaaaatgttggtttggactataatggtgtaatattattttctggtatccactatttggaaaccaatcaacatttagtaaaggaaatgaatataacggatgccatttatctctacttgagatttacaactccatcattatattctaaagtttactataatgtagcagttgaatcagttagtcgctactggctatggtatgccattacaaccgagcccttggaggatgtaaaaaaagaattgaagaatctttcagtgtttgttacaaaaacattattgcatgttctacttcaaaagaactgtattcaggtcaatcagcagttaagaatgataactttcactcttctcaccagattactatgtttaatacctgaaaaagttgcatttgagtttatcttagatgtgcttaagacatctccccttccattggctaagacgtccgtattatgtgtttttaaagacctttcaaggcgacgcatctccaccaaggataacgattctgagacggatttgattgtcgaaaaattatccaaactgaaggtcaatgatagtaacaaagctcagcaaagtaacatcagacattatatccaactagattcttccaaaatgaaagctgttcatgactgttgtctgcagactatccaagattcatttacggcagatgccaagaagagtgatatattattactgctaacttacttgaatattttcattgtgctaaaaaaaacatgggatgaagatctactgaagattgtttgttcgaagattgattctaatttgaagtcagtcgaacctgataaacttccgaagtataaggaaattgtggataaaaacgaatctctaaatgactattttactggtataaaatga

SEQ ID NO: 29 - protein, 688 aa, Saccharomyces cerevisiae
MEPIDDLLFEVTDAFKTQKEDLLELVTLIDIYGEQVNQEGSYEEKTRFIETLNTLLEDNPSTTGEIGWDLPKGLLKFLSKDNVDVNGRLGTNMIVQGVMKCFYAISIQGEPKKCLITGLELLSSLCSKDFSKSDQQNKEDFVDKKANTLPPEGVIENSSNRKDFPSYGESKSSNEFFLKLKSYILFEFIGASLKRISTLFPSKYLGAAVSTIEKFVYSHADTFEDALFLLRRVYTFCRNYIPPDPPKDIQLNEDFTREMFDKVVEEESELQVRLLRRLCTFGISTPIKTVTTNADVKYYCALNQQKFELSAYYTEYLELFCRYYQMAFSLDVDIEGEFQNVIKECRIIYKSVPQEISAVNDEAKLVLERMVYKLAYTFEVQKAAKEKNVGLDYNGVILFSGIHYLETNQHLVKEMNITDAIYLYLRFTTPSLYSKVYYNVAVESVSRYWLWYAITTEPLEDVKKELKNLSVFVTKTLLHVLLQKNCIQVNQQLRMITFTLLTRLLCLIPEKVAFEFILDVLKTSPLPLAKTSVLCVFKDLSRRRISTKDNDSETDLIVEKLSKLKVNDSNKAQQSNIRHYIQLDSSKMKAVHDCCLQTIQDSFTADAKKSDILLLLTYLNIFIVLKKTWDEDLLKIVCSKIDSNLKSVEPDKLPKYKEIVDKNESLNDYFTGIKDKNESLNDYFTGIK

SEQ ID NO: 30 - protein, 674 aa, Saccharomyces cerevisiae
MEPIDDILFEVTDAFKTQKEDLLELVTLIDIYGEQVNQEGSYEEKTRFIETLNTLLEDNPSTTGEIGWDLPKGLLKFLSKDNVDVNGRLGTNMIVQGVMKCFYAISIQGEPKKCLITGLELLSSLCSKDFSKSDQQNKEDFVDKKANTLPPEGVIENSSNRKDFPSYGESKSSNEFFLKLKSYILFEFIGASLKRISTLFPSKYLGAAVSTIEKFVYSHADTFEDALFLLRRVYTFCRNYIPPDPPKDIQLNEDFTREMFDKVVEEESELQVRLLRRLCTFGISTPIKTVTTNADVKYYCALNQQKFELSAYYTEYLELFCRYYQMAFSLDVDIEGEFQNVIKECRIIYKSVPQEISAVNDEAKLVLERMVYKLAYTFEVQKAAKEKNVGLDYNGVILFSGIHYLETNQHLVKEMNITDAIYLYLRFTTPSLYSKVYYNVAVESVSRYWLWYAITTEPLEDVKKELKNLSVFVTKTLLHVLLQKNCIQVNQQLRMITFTLLTRLLCLIPEKVAFEFILDVLKTSPLPLAKTSVLCVFKDLSRRRISTKDNDSETDLIVEKLSKLKVNDSNKAQQSNIRHYIQLDSSKMKAVHDCCLQTIQDSFTADAKKSDILLLLTYLNIFIVLKKTWDEDLLKIVCSKIDSNLKSVEPDKLPKYKEIVDKNESLNDYFTGIK

SEQ ID NO: 31 - protein, 104 aa, Saccharomyces cerevisiae
MVTQLKSASEYDSALASGDKLVVVDFFATWCGPCKMIAPMIEKFAEQYSDAAFYKLDVDEVSDVAQKAEVSSMPTLIFYKGGKEVTRVVGANPAAIKQAIASNV

SEQ ID NO: 32 - protein, 678 aa, Saccharomyces cerevisiae
MGLLALGTPLQWFESRTYNEHIRDEGIEQLLYIFQAAGKRDNDPLFWGDELEYMVVDFDDKERNSMLDVCHDKILTELNMEDSSLCEANDVSFHPEYGRYMLEATPASPYLNYVGSYVEVNMQKRRAIAEYKLSEYARQDSKNNLHVGSRSVPLTLTVFPRMGCPDFINIKDPWNHKNAASRSLFLPDEVINRHVRFPNLTASIRTRRGEKVCMNVPMYKDIATPETDDSIYDRDWFLPEDKEAKLASKPGFIYMDSMGFGMGCSCLQVTFQAPNINKARYLYDALVNFAPIMLAFSAAAPAFKGWLADQDVRWNVISGAVDDRTPKERGVAPLLPKYNKNGFGGIAKDVQDKVLEIPKSRYSSVDLFLGGSKFFNRTYNDTNVPINEKVLGRLLENDKAPLDYDLAKHFAHLYIRDPVSTFEELLNQDNKTSSNHFENIQSTNWQTLRFKPPTQQATPDKKDSPGWRVEFRPFEVQLLDFENAAYSVLIYLIVDSILTFSDNINAYIHMSKVWENMKIAHHRDAILFEKFHWKKSFRNDTDVETEDYSISEIFHNPENGIFPQFVTPILCQKGFVTKDWKELKHSSKHERLYYYLKLISDRASGELPTTAKFFRNFVLQHPDYKHDSKISKSINYDLLSTCDRLTHLDDSKGELTSFLGAEIAEYVKKNKPSIESKC

SEQ ID NO: 33 - protein, 491 aa, Saccharomyces cerevisiae
MAHYPPSKDQLNELIQEVNQWAITNGLSMYPPKFEENPSNASVSPVTIYPTPIPRKCFDEAVQIQPVFNELYARITQDMAQPDSYLHKTTEALALSDSEFTGKLWSLYLATLKSAQYKKQNFRLGIFRSDYLIDKKKGTEQIKQVEFNTVSVSFAGLSEKVDRLHSYLNRANKYDPKGPIYNDQNMVISDSGYLLSKALAKAVESYKSQQSSSTTSDPIVAFIVQRNERNVFDQKVLELNLLEKFGTKSVRLTFDDVNDKLFIDDKTGKLFIRDTEQEIAVVYYRTGYTTTDYTSEKDWEARLFLEKSFAIKAPDLLTQLSGSKKIQQLLTDEGVLGKYISDAEKKSSLLKTFVKIYPLDDTKLGREGKRLALSEPSKYVLKPQREGGGNNVYKENIPNFLKGIEERHWDAYILMELIEPELNENNIILRDNKSYNEPIISELGIYGCVLFNDEQVLSNEFSGSLLRSKFNTSNEGGVAAGFGCLDSIILY

SEQ ID NO: 34 - protein, 319 aa, Saccharomyces cerevisiae
MVHNKVTIIGSGPAAHTAAIYLARAEIKPILYEGMMANGIAAGGQLTTTTEIENFPGFPDGLTGSELMDRMREQSTKFGTEIITETVSKVDLSSKPFKLWTEFNEDAEPVTTDAIILATGASAKRMHLPGEETYWQKGISACAVCDGAVPIFRNKPLAVIGGGDSACEEAQFLTKYGSKVFMLVRKDHLRASTIMQKRAEKNEKIEILYNTVALEAKGDGKLLNALRIKNTKKNEETDLPVSGLFYAIGHTPATKIVAGQVDTDEAGYIKTVPGSSLTSVPGFFAAGDVQDSKYRQAITSAGSGCMAALDAEKYLTSLE

SEQ ID NO: 35 - protein, 162 aa, Saccharomyces cerevisiae
MTTSFYDLECKDKKGESFKFDQLKGKVVLIVNVASKCGFTPQYKELEELYKKYQDKGFVILGFPCNQFGKQEPGSDEQITEFCQLNYGVTFPIMKKIDVNGSNADSVYNYLKSQKAGLLGFKGIKWNFEKFLVDSNGKVVQRFSSLTKPSSLDQEIQSLLSK

SEQ ID NO: 36 - protein, 196 aa, Saccharomyces cerevisiae
MVAQVQKQAPTFKKTAVVDGVFDEVSLDKYKGKYVVLAFIPLAFTFVCPTEIIAFSEAAKKFEEQGAQVLFASTDSEYSLLAWTNIPRKEGGLGPINIPLLADTNHSLSRDYGVLIEEEGVALRGLFIIDPKGVIRHITINDLPVGRNVDEALRLVEAFQWTDKNGTVLPCNWTPGAATIKPTVEDSKEYFEAANK

SEQ ID NO: 37 - protein, 176 aa, Saccharomyces cerevisiae
MSDLVNKKFPAGDYKFQYIAISQSDADSESCKMPQTVEWSKLISENKKVIITGAPAAFSPTCTVSHIPGYINYLDELVKEKEVDQVIVVTVDNPFANQAWAKSLGVKDTTHIKFASDPGCAFTKSIGFELAVGDGVYWSGRWAMVVENGIVTYAAKETNPGTDVTVSSVESVLAHL

SEQ ID NO: 38 - protein, 483 aa, Saccharomyces cerevisiae
MLSATKQTFRSLQIRTMSTNTKHYDYLVIGGGSGGVASARRAASYGAKTLLVEAKALGGTCVNVGCVPKKVMWYASDLATRVSHANEYGLYQNLPLDKEHLTFNWPEFKQKRDAYVHRLNGIYQKNLEKEKVDVVFGWARFNKDGNVEVQKRDNTTEVYSANHILVATGGKAIFPENIPGFELGTDSDGFFRLEEQPKKVVVVGAGYIGIELAGVFHGLGSETHLVIRGETVLRKFDECIQNTITDHYVKEGINVHKLSKIVKVEKNVETDKLKIHMNDSKSIDDVDELIWTIGRKSHLGMGSENVGIKLNSHDQIIADEYQNTNVPNIYSLGDVVGKVELTPVAIAAGRKLSNRLFGPEKFRNDKLDYENVPSVIFSHPEAGSIGISEKEAIEKYGKENIKVYNSKFTAMYYAMLSEKSPTRYKIVCAGPNEKVVGLHIVGDSSAEILQGFGVAIKMGATKADFDNCVAIHPTSAEELVTMR

SEQ ID NO: 39 - protein, 570 aa, Bacillus subtilis
MTKATKEQKSLVKNRGAELVVDCLVEQGVTHVFGIPGAKIDAVFDALQDKGPEIIVARHEQNAAFMAQAVGRLTGKPGVVLVTSGPGASNLATGLLTANTEGDPVVALAGNVIRADRLKRTHQSLDNAALFQPITKYSVEVQDVKNIPEAVTNAFRIASAGQAGAAFVSFPQDVVNEVTNTKNVRAVAAPKLGPAADDAISAAIAKIQTAKLPVVLVGMKGGRPEAIKAVRKLLKKVQLPFVETYQAAGTLSRDLEDQYFGRIGLFRNQPGDLLLEQADVVLTIGYDPIEYDPKFWNINGDRTIIHLDEIIADIDHAYQPDLELIGDIPSTINHIEHDAVKVEFAEREQKILSDLKQYMHEGEQVPADWKSDRAHPLEIVKELRNAVDDHVTVTCDIGSHAIWMSRYFRSYEPLTLMISNGMQTLGVALPWAIGASLVKPGEKVVSVSGDGGFLFSAMELETAVRLKAPIVHIVWNDSTYDMVAFQQLKKYNRTSAVDFGNIDIVKYAESFGATGLRVESPDQLADVLRQGMNAEGPVIIDVPVDYSDNINLASDKLPKEFGELMKTKAL

SEQ ID NO: 40 - DNA, 1716 bp, Bacillus subtilis
atgttgacaaaagcaacaaaagaacaaaaatcccttgtgaaaaacagaggggcggagcttgttgttgattgcttagtggagcaaggtgtcacacatgtatttggcattccaggtgcaaaaattgatgcggtatttgacgctttacaagataaaggacctgaaattatcgttgcccggcacgaacaaaacgcagcattcatggcccaagcagtcggccgtttaactggaaaaccgggagtcgtgttagtcacatcaggaccgggtgcctctaacttggcaacaggcctgctgacagcgaacactgaaggagaccctgtcgttgcgcttgctggaaacgtgatccgtgcagatcgtttaaaacggacacatcaatctttggataatgcggcgctattccagccgattacaaaatacagtgtagaagttcaagatgtaaaaaatataccggaagctgttacaaatgcatttaggatagcgtcagcagggcaggctggggccgcttttgtgagctttccgcaagatgttgtgaatgaagtcacaaatacgaaaaacgtgcgtgctgttgcagcgccaaaactcggtcctgcagcagatgatgcaatcagtgcggccatagcaaaaatccaaacagcaaaacttcctgtcgttttggtcggcatgaaaggcggaagaccggaagcaattaaagcggttcgcaagcttttgaaaaaggttcagcttccatttgttgaaacatatcaagctgccggtaccctttctagagatttagaggatcaatattttggccgtatcggtttgttccgcaaccagcctggcgatttactgctagagcaggcagatgttgttctgacgatcggctatgacccgattgaatatgatccgaaattctggaatatcaatggagaccggacaattatccatttagacgagattatcgctgacattgatcatgcttaccagcctgatcttgaattgatcggtgacattccgtccacgatcaatcatatcgaacacgatgctgtgaaagtggaatttgcagagcgtgagcagaaaatcctttctgatttaaaacaatatatgcatgaaggtgagcaggtgcctgcagattggaaatcagacagagcgcaccctcttgaaatcgttaaagagttgcgtaatgcagtcgatgatcatgttacagtaacttgcgatatcggttcgcacgccatttggatgtcacgttatttccgcagctacgagccgttaacattaatgatcagtaacggtatgcaaacactcggcgttgcgcttccttgggcaatcggcgcttcattggtgaaaccgggagaaaaagtggtttctgtctctggtgacggcggtttcttattctcagcaatggaattagagacagcagttcgactaaaagcaccaattgtacacattgtatggaacgacagcacatatgacatggttgcattccagcaattgaaaaaatataaccgtacatctgcggtcgatttcggaaatatcgatatcgtgaaatatgcggaaagcttcggagcaactggcttgcgcgtagaatcaccagaccagctggcagatgttctgcgtcaaggcatgaacgctgaaggtcctgtcatcatcgatgtcccggttgactacagtgataacattaatttagcaagtgacaagcttccgaaagaattcggggaactcatgaaaacgaaagctctctag

SEQ ID NO: 41 - protein, 559 aa, Klebsiella pneumoniae
MDKQYPVRQWAHGADLVVSQLEAQGVRQVFGIPGAKIDKVFDSLLDSSIRIIPVRHEANAAFMAAAVGRITGKAGVALVTSGPGCSNLITGMATANSEGDPVVALGGAVKRADKAKQVHQSMDTVAMFSPVTKYAIEVTAPDALAEVVSNAFRAAEQGRPGSAFVSLPQDVVDGPVSGKVLPASGAPQMGAAPDDAIDQVAKLIAQAKNPIFLLGLMASQPENSKALRRLLETSHIPVTSTYQAAGAVNQDNFSRFAGRVGLFNNQAGDRLLQLADLVICIGYSPVEYEPAMWNSGNATLVHIDVLPAYEERNYTPDVELVGDIAGTLNKLAQNIDHRLVLSPQAAEILRDRQHQRELLDRRGAQLNQFALHPLRIVRAMQDIVNSDVTLTVDMGSFHIWIARYLYTFRARQVMISNGQQTMGVALPWAIGAWLVNPERKVVSVSGDGGFLQSSMELETAVRLKANVLHLIWVDNGYNMVAIQEEKKYQRLSGVEFGPMDFKAYAESFGAKGFAVESAEALEPTLRAAMDVDGPAVVAIPVDYRDNPLLMGQLHLSQIL

SEQ ID NO: 42 - DNA, 2055 bp, Klebsiella pneumoniae
tcgaccacggggtgctgaccttcggcgaaattcacaagctgatgatcgacctgcccgccgacagcgcgttcctgcaggctaatctgcatcccgataatctcgatgccgccatccgttccgtagaaagttaagggggtcacatggacaaacagtatccggtacgccagtgggcgcacggcgccgatctcgtcgtcagtcagctggaagctcagggagtacgccaggtgttcggcatccccggcgccaaaatcgacaaggtctttgattcactgctggattcctccattcgcattattccggtacgccacgaagccaacgccgcatttatggccgccgccgtcggacgcattaccggcaaagcgggcgtggcgctggtcacctccggtccgggctgttccaacctgatcaccggcatggccaccgcgaacagcgaaggcgacccggtggtggccctgggcggcgcggtaaaacgcgccgataaagcgaagcaggtccaccagagtatggatacggtggcgatgttcagcccggtcaccaaatacgccatcgaggtgacggcgccggatgcgctggcggaagtggtctccaacgccttccgcgccgccgagcagggccggccgggcagcgcgttcgttagcctgccgcaggatgtggtcgatggcccggtcagcggcaaagtgctgccggccagcggggccccgcagatgggcgccgcgccggatgatgccatcgaccaggtggcgaagcttatcgcccaggcgaagaacccgatcttcctgctcggcctgatggccagccagccggaaaacagcaaggcgctgcgccgtttgctggagaccagccatattccagtcaccagcacctatcaggccgccggagcggtgaatcaggataacttctctcgcttcgccggccgggttgggctgtttaacaaccaggccggggaccgtctgctgcagctcgccgacctggtgatctgcatcggctacagcccggtggaatacgaaccggcgatgtggaacagcggcaacgcgacgctggtgcacatcgacgtgctgcccgcctatgaagagcgcaactacaccccggatgtcgagctggtgggcgatatcgccggcactctcaacaagctggcgcaaaatatcgatcatcggctggtgctctccccgcaggcggcggagatcctccgcgaccgccagcaccagcgcgagctgctggaccgccgcggcgcgcagctcaaccagtttgccctgcatcccctgcgcatcgttcgcgccatgcaggatatcgtcaacagcgacgtcacgttgaccgtggacatgggcagcttccatatctggattgcccgctacctgtacacgttccgcgcccgtcaggtgatgatctccaacggccagcagaccatgggcgtcgccctgccctgggctatcggcgcctggctggtcaatcctgagcgcaaagtggtctccgtctccggcgacggcggcttcctgcagtcgagcatggagctggagaccgccgtccgcctgaaagccaacgtgctgcatcttatctgggtcgataacggctacaacatggtcgctatccaggaagagaaaaaatatcagcgcctgtccggcgtcgagtttgggccgatggattttaaagcctatgccgaatccttcggcgcgaaagggtttgccgtggaaagcgccgaggcgctggagccgaccctgcgcgcggcgatggacgtcgacggcccggcggtagtggccatcccggtggattatcgcgataacccgctgctgatgggccagctgcatctgagtcagattctgtaagtcatcacaataaggaaagaaaaatgaaaaaagtcgcacttgttaccggcgccggccaggggattggtaaagctatcgcccttcgtctggtgaaggatggatttgccgtggccattgccgattataacgacgccaccgccaaagcggtcgcctccgaaatcaaccaggccggcggccgcgccatggcggtgaaagtggatgtttctgaccgcgaccaggtatttgccgccgtcga

SEQ ID NO: 43 - protein, 554 aa, Lactococcus lactis
MSEKQFGANLVVDSLINHKVKYVFGIPGAKIDRVFDLLENEEGPQMVVTRHEQGAAFMAQAVGRLTGEPGVVVVTSGPGVSNLATPLLTATSEGDAILAIGGQVKRSDRLKRAHQSMDNAGMMQSATKYSAEVLDPNTLSESIANAYRIAKSGHPGATFLSIPQDVTDAEVSIKAIQPLSDPKMGNASIDDINYLAQAIKNAVLPVILVGAGASDAKVASSLRNLLTHVNIPVVETFQGAGVISHDLEHTFYGRIGLFRNQPGDMLLKRSDLVIAVGYDPIEYEARNWNAEIDSRIIVIDNAIAEIDTYYQPERELIGDIAATLDNLLPAVRGYKIPKGTKDYLDGLHEVAEQHEFDTENTEEGRMHPLDLVSTFQEIVKDDETVTVDVGSLYIWMARHFKSYEPRHLLFSNGMQTLGVALPWAITAALLRPGKKVYSHSGDGGFLFTGQELETAVRLNLPIVQIIWNDGHYDMVKFQEEMKYGRSAAVDFGYVDYVKYAEAMRAKGYRAHSKEELAEILKSIPDTTGPVVIDVPLDYSDNIKLAEKLLPEEFY

SEQ ID NO: 44 - DNA, 3220 bp, Lactococcus lactis
tagatccggaaacaactgattacctgagttaacttagcagaaattgcagaagataacggtaatttggatgaagcattaaattacctttatcaaattccggtgaatgatgaaaattatattgctgctttaatcaaaattgctgacttatatcaatttgaagttgattttgaaacagcaatttctaagttagaagaagcaagagaattatcggattctcctctgattacttttgctttggctgagtcctactttgaacaaggtgattattcagctgccattaccgaatatgcaaaactttcagaacgaaaaattttacatgaaacaaaaatttctatttatcaaagaattggtgactcttatgcccaattaggtaattttgagaatgccatatcatttcttgaaaaatcacttgaatttgatgaaaaaccggaaaccttgtataaaattgctcttctttatggagaaactcataatgaaacaagagccattgctaatttcaaacggttagaaaaaatggatgttgaatttttgaactatgaattagcctatgcccaaaccctagaagctaatcaagaatttaaagctgcactagaaatggcaaagaaagggatgaaaaaaaatcctaatgccgttcctctcttacacttcgcttcaaaaatttgtttcaaacttaaggacaaagctgcagcagaacgttatctcgtggatgctttaaatttaccagaattacatgacgaaacagtctttttgcttgctaatttatacttcaacgaagaagattttgaagctgtcattaatcttgaagagcttttagaagatgaacatttattagctaaatggctttttgcaggagcacataaagctttggaaaatgattctgaagcggctgctttgtatgaagaactcattcaaaccaatctgtcagagaatccagagtttttagaagactatattgattttcttaaagaaattggtcaaatttctaaaacagaaccaattattgaacaatatttggaacttgttccagatgatgaaaatatgagaaatttactgacagacttaaaaaataattactgacaaagctgtcagtaattatttttattgtaagctagaaaattcaaaaacttgcgtcaaaataattgtaaaaggttctattatctgataaaatgattgtgaagtaatccaagagattatgaaatatgaattagaacaaatagaggtaaaataaaaaatgtctgagaaacaatttggggcgaacttggttgtcgatagtttgattaaccataaagtgaagtatgtatttgggattccaggagcaaaaattgaccgggtttttgatttattagaaaatgaagaaggccctcaaatggtcgtgactcgtcatgagcaaggagctgctttcatggctcaagctgtcggtcgtttaactggcgaacctggtgtagtagttgttacgagtgggcctggtgtatcaaaccttgcgactccgcttttgaccgcgacatcagaaggtgatgctattttggctatcggtggacaagttaaacgaagtgaccgtcttaaacgtgcgcaccaatcaatggataatgctggaatgatgcaatcagcaacaaaatattcagcagaagttcttgaccctaatacactttctgaatcaattgccaacgcttatcgtattgcaaaatcaggacatccaggtgcaactttcttatcaatcccccaagatgtaacggatgccgaagtatcaatcaaagccattcaaccactttcagaccctaaaatggggaatgcctctattgatgacattaattatttagcacaagcaattaaaaatgctgtattgccagtaattttggttggagctggtgcttcagatgctaaagtcgcttcatccttgcgtaatctattgactcatgttaatattcctgtcgttgaaacattccaaggtgcaggggttatttcacatgatttagaacatactttttatggacgtatcggtcttttccgcaatcaaccaggcgatatgcttctgaaacgttctgaccttgttattgctgttggttatgacccaattgaatatgaagctcgtaactggaatgcagaaattgatagtcgaattatcgttattgataatgccattgctgaaattgatacttactaccaaccagagcgtgaattaattggtgatatcgcagcaacattggataatcttttaccagctgttcgtggctacaaaattccaaaaggaacaaaagattatctcgatggccttcatgaagttgctgagcaacacgaatttgatactgaaaatactgaagaaggtagaatgcaccctcttgatttggtcagcactttccaagaaatcgtcaaggatgatgaaacagtaaccgttgacgtaggttcactctacatttggatggcacgtcatttcaaatcatacgaaccacgtcatctcctcttctcaaacggaatgcaaacactcggagttgcacttccttgggcaattacagccgcattgttgcgcccaggtaaaaaagtttattcacactctggtgatggaggcttccttttcacagggcaagaattggaaacagctgtacgtttgaatcttccaatcgttcaaattatctggaatgacggccattatgatatggttaaattccaagaagaaatgaaatatggtcgttcagcagccgttgattttggctatgttgattacgtaaaatatgctgaagcaatgagagcaaaaggttaccgtgcacacagcaaagaagaacttgctgaaattctcaaatcaatcccagatactactggaccggtggtaattgacgttcctttggactattctgataacattaaattagcagaaaaattattgcctgaagagttttattgattacaatcaagcaatttgtggcataacaaaataaaagaagaaggccttgaacacctaagcgttcagggcctttttttgtgaaataaattagatgaaatttacaatgagttttgtgaaactagcttctagtttgtgaaaaattgcctataattgccgaataaaaatacccatttaccactccaagaggatgcttcaaattagctaaatacccgttttagaggatgcgtaaaaacaacaaaagaggatgagtatagaacgataaaacttttttatgataggttgagagaattgaatataaaatataataagtagaaggcagcaatt

SEQ ID NO: 45 - protein, 491 aa, Escherichia coli
MANYFNTLNLRQQLAQLGKCRFMGRDEFADGASYLQGKKVVIVGCGAQGLNQGLNMRDSGLDISYALRKEAIAEKRASWRKATENGFKVGTYEELIPQADLVINLTPDKQHSDVVRTVQPLMKDGAALGYSHGFNIVEVGEQIRKDITVVMVAPKCPGTEVREEYKRGFGVPTLIAVHPENDPKGEGMAIAKAWAAATGGHRAGVLESSFVAEVKSDLMGEQTILCGMLQAGSLLCFDKLVEEGTDPAYAEKLIQFGWETITEALKQGGITLMMDRLSNPAKLRAYALSEQLKEIMAPLFQKHMDDIISGEFSSGMMADWANDDKKLLTWREETGKTAFETAPQYEGKIGEQEYFDKGVLMIAMVKAGVELAFETMVDSGIIEESAYYESLHELPLIANTIARKRLYEMNVVISDTAEYGNYLFSYACVPLLKPFMAELQPGDLGKAIPEGAVDNGQLRDVNEAIRSHAIEQVGKKLRGYMTDMKRIAVAG

SEQ ID NO: 46 - DNA, 1476 bp, Escherichia coli
atggctaactacttcaatacactgaatctgcgccagcagctggcacagctgggcaaatgtcgctttatgggccgcgatgaattcgccgatggcgcgagctaccttcagggtaaaaaagtagtcatcgtcggctgtggcgcacagggtctgaaccagggcctgaacatgcgtgattctggtctcgatatctcctacgctctgcgtaaagaagcgattgccgagaagcgcgcgtcctggcgtaaagcgaccgaaaatggttttaaagtgggtacttacgaagaactgatcccacaggcggatctggtgattaacctgacgccggacaagcagcactctgatgtagtgcgcaccgtacagccactgatgaaagacggcgcggcgctgggctactcgcacggtttcaacatcgtcgaagtgggcgagcagatccgtaaagatatcaccgtagtgatggttgcgccgaaatgcccaggcaccgaagtgcgtgaagagtacaaacgtgggttcggcgtaccgacgctgattgccgttcacccggaaaacgatccgaaaggcgaaggcatggcgattgccaaagcctgggcggctgcaaccggtggtcaccgtgcgggtgtgctggaatcgtccttcgttgcggaagtgaaatctgacctgatgggcgagcaaaccatcctgtgcggtatgttgcaggctggctctctgctgtgcttcgacaagctggtggaagaaggtaccgatccagcatacgcagaaaaactgattcagttcggttgggaaaccatcaccgaagcactgaaacagggcggcatcaccctgatgatggaccgtctctctaacccggcgaaactgcgtgcttatgcgctttctgaacagctgaaagagatcatggcacccctgttccagaaacatatggacgacatcatctccggcgaattctcttccggtatgatggcggactgggccaacgatgataagaaactgctgacctggcgtgaagagaccggcaaaaccgcgtttgaaaccgcgccgcagtatgaaggcaaaatcggcgagcaggagtacttcgataaaggcgtactgatgattgcgatggtgaaagcgggcgttgaactggcgttcgaaaccatggtcgattccggcatcattgaagagtctgcatattatgaatcactgcacgagctgccgctgattgccaacaccatcgcccgtaagcgtctgtacgaaatgaacgtggttatctctgataccgctgagtacggtaactatctgttctcttacgcttgtgtgccgttgctgaaaccgtttatggcagagctgcaaccgggcgacctgggtaaagctattccggaaggcgcggtagataacgggcaactgcgtgatgtgaacgaagcgattcgcagccatgcgattgagcaggtaggtaagaaactgcgcggctatatgacagatatgaaacgtattgctgttgcgggttaa

SEQ ID NO: 47 - protein, 395 aa, Saccharomyces cerevisiae
MLRTQAARLICNSRVITAKRTFALATRAAAYSRPAARFVKPMITTRGLKQINFGGTVETVYERADWPREKLLDYFKNDTFALIGYGSQGYGQGLNLRDNGLNVIIGVRKDGASWKAAIEDGWVPGKNLFTVEDAIKRGSYVMNLLSDAAQSETWPAIKPLLTKGKTLYFSHGFSPVFKDLTHVEPPKDLDVILVAPKGSGRTVRSLFKEGRGINSSYAVWNDVTGKAHEKAQALAVAIGSGYVYQTTFEREVNSDLYGERGCLMGGIHGMFLAQYDVLRENGHSPSEAFNETVEEATQSLYPLIGKYGMDYMYDACSTTARRGALDWYPIFKNALKPVFQDLYESTKNGTETKRSLEFNSQPDYREKLEKELDTIRNMEIWKVGKEVRKLRPENQ

SEQ ID NO: 48 - DNA, 1188 bp, Saccharomyces cerevisiae
atgttgagaactcaagccgccagattgatctgcaactcccgtgtcatcactgctaagagaacctttgctttggccacccgtgctgctgcttacagcagaccagctgcccgtttcgttaagccaatgatcactacccgtggtttgaagcaaatcaacttcggtggtactgttgaaaccgtctacgaaagagctgactggccaagagaaaagttgttggactacttcaagaacgacacttttgctttgatcggttacggttcccaaggttacggtcaaggtttgaacttgagagacaacggtttgaacgttatcattggtgtccgtaaagatggtgcttcttggaaggctgccatcgaagacggttgggttccaggcaagaacttgttcactgttgaagatgctatcaagagaggtagttacgttatgaacttgttgtccgatgccgctcaatcagaaacctggcctgctatcaagccattgttgaccaagggtaagactttgtacttctcccacggtttctccccagtcttcaaggacttgactcacgttgaaccaccaaaggacttagatgttatcttggttgctccaaagggttccggtagaactgtcagatctttgttcaaggaaggtcgtggtattaactcttcttacgccgtctggaacgatgtcaccggtaaggctcacgaaaaggcccaagctttggccgttgccattggttccggttacgtttaccaaaccactttcgaaagagaagtcaactctgacttgtacggtgaaagaggttgtttaatgggtggtatccacggtatgttcttggctcaatacgacgtcttgagagaaaacggtcactccccatctgaagctttcaacgaaaccgtcgaagaagctacccaatctctatacccattgatcggtaagtacggtatggattacatgtacgatgcttgttccaccaccgccagaagaggtgctttggactggtacccaatcttcaagaatgctttgaagcctgttttccaagacttgtacgaatctaccaagaacggtaccgaaaccaagagatctttggaattcaactctcaacctgactacagagaaaagctagaaaaggaattagacaccatcagaaacatggaaatctggaaggttggtaaggaagtcagaaagttgagaccagaaaaccaataa

SEQ ID NO: 49 - protein, 330 aa, Methanococcus maripaludis
MKVFYDSDFKLDALKEKTIAVIGYGSQGRAQSLNMKDSGLNVVVGLRKNGASWNNAKADGHNVMTIEEAAEKADIIHILIPDELQAEVYESQIKPYLKEGKTLSFSHGFNIHYGFIVPPKGVNVVLVAPKSPGKMVRRTYEEGFGVPGLICIEIDATNNAFDIVSAMAKGIGLSRAGVIQTTFKEETETDLFGEQAVLCGGVTELIKAGFETLVEAGYAPEMAYFETCHELKLIVDLIYQKGFKNMWNDVSNTAEYGGLTRRSRIVTADSKAAMKEILREIQDGRFTKEFLLEKQVSYAHLKSMRRLEGDLQIEEVGAKLRKMCGLEKEE

SEQ ID NO: 50 - DNA, 993 bp, Methanococcus maripaludis
atgaaggtattctatgactcagattttaaattagatgctttaaaagaaaaaacaattgcagtaatcggttatggaagtcaaggtagggcacagtccttaaacatgaaagacagcggattaaacgttgttgttggtttaagaaaaaacggtgcttcatggaacaacgctaaagcagacggtcacaatgtaatgaccattgaagaagctgctgaaaaagcggacatcatccacatcttaatacctgatgaattacaggcagaagtttatgaaagccagataaaaccatacctaaaagaaggaaaaacactaagcttttcacatggttttaacatccactatggattcattgttccaccaaaaggagttaacgtggttttagttgctccaaaatcacctggaaaaatggttagaagaacatacgaagaaggtttcggtgttccaggtttaatctgtattgaaattgatgcaacaaacaacgcatttgatattgtttcagcaatggcaaaaggaatcggtttatcaagagctggagttatccagacaactttcaaagaagaaacagaaactgaccttttcggtgaacaagctgttttatgcggtggagttaccgaattaatcaaggcaggatttgaaacactcgttgaagcaggatacgcaccagaaatggcatactttgaaacctgccacgaattgaaattaatcgttgacttaatctaccaaaaaggattcaaaaacatgtggaacgatgtaagtaacactgcagaatacggcggacttacaagaagaagcagaatcgttacagctgattcaaaagctgcaatgaaagaaatcttaagagaaatccaagatggaagattcacaaaagaattccttctcgaaaaacaggtaagctatgctcatttaaaatcaatgagaagactcgaaggagacttacaaatcgaagaagtcggcgcaaaattaagaaaaatgtgcggtcttgaaaaagaagaataa

SEQ ID NO: 51 - protein, 342 aa, Bacillus subtilis
MVKVYYNGDIKENVLAGKTVAVIGYGSQGHAHALNLKESGVDVIVGVRQGKSFTQAQEDGHKVFSVKEAAAQAEIIMVLLPDEQQQKVYEAEIKDELTAGKSLVFAHGFNVHFHQIVPPADVDVFLVAPKGPGHLVRRTYEQGAGVPALFAIYQDVTGEARDKALAYAKGIGGARAGVLETTFKEETETDLFGEQAVLCGGLSALVKAGFETLTEAGYQPELAYFECLHELKLIVDLMYEEGLAGMRYSISDTAQWGDFVSGPRVVDAKVKESMKEVLKDIQNGTFAKEWIVENQVNRPRFNAINASENEHQIEVVGRKLREMMPFVKQGKKKEAVVSVAQN

SEQ ID NO: 52 - DNA, 1476 bp, Bacillus subtilis; identical to SEQ ID NO: 46

SEQ ID NO: 53 - protein, 343 aa, Anaerostipes caccae
MEECKMAKIYYQEDCNLSLLDGKTIAVIGYGSQGHAHALNAKESGCNVIIGLYEGAKEWKRAEEQGFEVYTAAEAAKKADIIMILINDEKQATMYKNDIEPNLEAGNMLMFAHGFNIHFGCIVPPKDVDVTMIAPKGPGHTVRSEYEEGKGVPCLVAVEQDATGKALDMALAYALAIGGARAGVLETTFRTETETDLFGEQAVLCGGVCALMQAGFETLVEAGYDPRNAYFECIHEMKLIVDLIYQSGFSGMRYSISNTAEYGDYITGPKIITEDTKKAMKKILSDIQDGTFAKDFLVDMSDAGSQVHFKAMRKLASEHPAEVVGEEIRSLYSWSDEDKLINN

SEQ ID NO: 54 - protein, 343 aa, Anaerostipes caccae
MEECKMAKIYYQEDCNLSLLDGKTIAVIGYGSQGHAHALNAKESGCNVIIGLYEGAKDWKRAEEQGFEVYTAAEAAKKADIIMILINDEKQATMYKNDIEPNLEAGNMLMFAHGFNIHFGCIVPPKDVDVTMIAPKGPGHTVRSEYEEGKGVPCLVAVEQDATGKALDMALAYALAIGGARAGVLETTFRTETETDLFGEQAVLCGGVCALMQAGFETLVEAGYDPRNAYFECIHEMKLIVDLIYQSGFSGMRYSISNTAEYGDYITGPKIITEDTKKAMKKILSDIQDGTFAKDFLVDMSDAGSQVHFKAMRKLASEHPAEVVGEEIRSLYSWSDEDKLINN

SEQ ID NO: 55 - protein, 616 aa, Escherichia coli
MPKYRSATTTHGRNMAGARALWRATGMTDADFGKPIIAVVNSFTQFVPGHVHLRDLGKLVAEQIEAAGGVAKEFNTIAVDDGIAMGHGGMLYSLPSRELIADSVEYMVNAHCADAMVCISNCDKITPGMLMASLRLNIPVIFVSGGPMEAGKTKLSDQIIKLDLVDAMIQGADPKVSDSQSDQVERSACPTCGSCSGMFTANSMNCLTEALGLSQPGNGSLLATHADRKQLFLNAGKRIVELTKRYYEQNDESALPRNIASKAAFENAMTLDIAMGGSTNTVLHLLAAAQEAEIDFTMSDIDKLSRKVPQLCKVAPSTQKYHMEDVHRAGGVIGILGELDRAGLLNRDVKNVLGLTLPQTLEQYDVMLTQDDAVKNMFRAGPAGIRTTQAFSQDCRWDTLDDDRANGCIRSLEHAYSKDGGLAVLYGNFAENGCIVKTAGVDDSILKFTGPAKVYESQDDAVEAILGGKVVAGDVVVIRYEGPKGGPGMQEMLYPTSFLKSMGLGKACALITDGRFSGGTSGLSIGHVSPEAASGGSIGLIEDGDLIAIDIPNRGIQLQVSDAELAARREAQDARGDKAWTPKNRERQVSFALRAYASLATSADKGAVRDKSKLGG

SEQ ID NO: 56 - DNA, 1851 bp, Escherichia coli
atgcctaagtaccgttccgccaccaccactcatggtcgtaatatggcgggtgctcgtgcgctgtggcgcgccaccggaatgaccgacgccgatttcggtaagccgattatcgcggttgtgaactcgttcacccaatttgtaccgggtcacgtccatctgcgcgatctcggtaaactggtcgccgaacaaattgaagcggctggcggcgttgccaaagagttcaacaccattgcggtggatgatgggattgccatgggccacggggggatgctttattcactgccatctcgcgaactgatcgctgattccgttgagtatatggtcaacgcccactgcgccgacgccatggtctgcatctctaactgcgacaaaatcaccccggggatgctgatggcttccctgcgcctgaatattccggtgatctttgtttccggcggcccgatggaggccgggaaaaccaaactttccgatcagatcatcaagctcgatctggttgatgcgatgatccagggcgcagacccgaaagtatctgactcccagagcgatcaggttgaacgttccgcgtgtccgacctgcggttcctgctccgggatgtttaccgctaactcaatgaactgcctgaccgaagcgctgggcctgtcgcagccgggcaacggctcgctgctggcaacccacgccgaccgtaagcagctgttccttaatgctggtaaacgcattgttgaattgaccaaacgttattacgagcaaaacgacgaaagtgcactgccgcgtaatatcgccagtaaggcggcgtttgaaaacgccatgacgctggatatcgcgatgggtggatcgactaacaccgtacttcacctgctggcggcggcgcaggaagcggaaatcgacttcaccatgagtgatatcgataagctttcccgcaaggttccacagctgtgtaaagttgcgccgagcacccagaaataccatatggaagatgttcaccgtgctggtggtgttatcggtattctcggcgaactggatcgcgcggggttactgaaccgtgatgtgaaaaacgtacttggcctgacgttgccgcaaacgctggaacaatacgacgttatgctgacccaggatgacgcggtaaaaaatatgttccgcgcaggtcctgcaggcattcgtaccacacaggcattctcgcaagattgccgttgggatacgctggacgacgatcgcgccaatggctgtatccgctcgctggaacacgcctacagcaaagacggcggcctggcggtgctctacggtaactttgcggaaaacggctgcatcgtgaaaacggcaggcgtcgatgacagcatcctcaaattcaccggcccggcgaaagtgtacgaaagccaggacgatgcggtagaagcgattctcggcggtaaagttgtcgccggagatgtggtagtaattcgctatgaaggcccgaaaggcggtccggggatgcaggaaatgctctacccaaccagcttcctgaaatcaatgggtctcggcaaagcctgtgcgctgatcaccgacggtcgtttctctggtggcacctctggtctttccatcggccacgtctcaccggaagcggcaagcggcggcagcattggcctgattgaagatggtgacctgatcgctatcgacatcccgaaccgtggcattcagttacaggtaagcgatgccgaactggcggcgcgtcgtgaagcgcaggacgctcgaggtgacaaagcctggacgccgaaaaatcgtgaacgtcaggtctcctttgccctgcgtgcttatgccagcctggcaaccagcgccgacaaaggcgcggtgcgcgataaatcgaaactggggggttaa

SEQ ID NO: 57 - protein, 585 aa, Saccharomyces cerevisiae
MGLLTKVATSRQFSTTRCVAKKLNKYSYIITEPKGQGASQAMLYATGFKKEDFKKPQVGVGSCWWSGNPCNMHLLDLNNRCSQSIEKAGLKAMQFNTIGVSDGISMGTKGMRYSLQSREIIADSFETIMMAQHYDANIAIPSCDKNMPGVMMAMGRHNRPSIMVYGGTILPGHPTCGSSKISKNIDIVSAFQSYGEYISKQFTEEEREDVVEHACPGPGSCGGMYTANTMASAAEVLGLTIPNSSSFPAVSKEKLAECDNIGEYIKKTMELGILPRDILTKEAFENAITYVVATGGSTNAVLHLVAVAHSAGVKLSPDDFQRISDTTPLIGDFKPSGKYVMADLINVGGTQSVIKYLYENNMLHGNTMTVTGDTLAERAKKAPSLPEGQEIIKPLSHPIKANGHLQILYGSLAPGGAVGKITGKEGTYFKGRARVFEEEGAFIEALERGEIKKGEKTVVVIRYEGPRGAPGMPEMLKPSSALMGYGLGKDVALLTDGRFSGGSHGFLIGHIVPEAAEGGPIGLVRDGDEIIIDADNNKIDLLVSDKEMAQRKQSWVAPPPRYTRGTLSKYAKLVSNASNGCVLDA

SEQ ID NO: 58 - DNA, 1131 bp, Saccharomyces cerevisiae
atgaccttggcacccctagacgcctccaaagttaagataactaccacacaacatgcatctaagccaaaaccgaacagtgagttagtgtttggcaagagcttcacggaccacatgttaactgcggaatggacagctgaaaaagggtggggtaccccagagattaaaccttatcaaaatctgtctttagacccttccgcggtggttttccattatgcttttgagctattcgaagggatgaaggcttacagaacggtggacaacaaaattacaatgtttcgtccagatatgaatatgaagcgcatgaataagtctgctcagagaatctgtttgccaacgttcgacccagaagagttgattaccctaattgggaaactgatccagcaagataagtgcttagttcctgaaggaaaaggttactctttatatatcaggcctacattaatcggcactacggccggtttaggggtttccacgcctgatagagccttgctatatgtcatttgctgccctgtgggtccttattacaaaactggatttaaggcggtcagactggaagccactgattatgccacaagagcttggccaggaggctgtggtgacaagaaactaggtgcaaactacgccccctgcgtcctgccacaattgcaagctgcttcaaggggttaccaacaaaatttatggctatttggtccaaataacaacattactgaagtcggcaccatgaatgcttttttcgtgtttaaagatagtaaaacgggcaagaaggaactagttactgctccactagacggtaccattttggaaggtgttactagggattccattttaaatcttgctaaagaaagactcgaaccaagtgaatggaccattagtgaacgctacttcactataggcgaagttactgagagatccaagaacggtgaactacttgaagcctttggttctggtactgctgcgattgtttctcccattaaggaaatcggctggaaaggcgaacaaattaatattccgttgttgcccggcgaacaaaccggtccattggccaaagaagttgcacaatggattaatggaatccaatatggcgagactgagcatggcaattggtcaagggttgttactgatttgaactga

SEQ ID NO: 59 - protein, 550 aa, Methanococcus maripaludis
MISDNVKKGVIRTPNRALLKACGYTDEDMEKPFIGIVNSFTEVVPGHIHLRTLSEAAKHGVYANGGTPFEFNTIGICDGIAMGHEGMKYSLPSREIIADAVESMARAHGFDGLVLIPTCDKIVPGMIMGALRLNIPFIVVTGGPMLPGEFQGKKYELISLFEGVGEYQVGKITEEELKCIEDCACSGAGSCAGLYTANSMACLTEALGLSLPMCATTHAVDAQKVRLAKKSGSKIVDMVKEDLKPTDILTKEAFENAILVDLALGGSTNTTLHIPAIANEIENKFITLDDFDRLSDEVPHIASIKPGGEHYMIDLHNAGGIPAVLNVLKEKIRDTKTVDGRSILEIAESVKYINYDVIRKVEAPVHETAGLRVLKGNLAPNGCVVKIGAVHPKMYKHDGPAKVYNSEDEAISAILGGKIVEGDVIVIRYEGPSGGPGMREMLSPTSAICGMGLDDSVALITDGRFSGGSRGPCIGHVSPEAAAGGVIAAIENGDIIKIDMIEKEINVDLDESVIKERLSKLGEFEPKIKKGYLSRYSKLVSSADEGAVLK

SEQ ID NO: 60 - DNA, 1653 bp, Methanococcus maripaludis
atgataagtgataacgtcaaaaagggagttataagaactccaaaccgagctcttttaaaggcttgcggatatacagacgaagacatggaaaaaccatttattggaattgtaaacagctttacagaagttgttcccggccacattcacttaagaacattatcagaagcggctaaacatggtgtttatgcaaacggtggaacaccatttgaatttaataccattggaatttgcgacggtattgcaatgggccacgaaggtatgaaatactctttaccttcaagagaaattattgcagacgctgttgaatcaatggcaagagcacatggatttgatggtcttgttttaattcctacgtgtgataaaatcgttcctggaatgataatgggtgctttaagactaaacattccatttattgtagttactggaggaccaatgcttcccggagaattccaaggtaaaaaatacgaacttatcagcctttttgaaggtgtcggagaataccaagttggaaaaattactgaagaagagttaaagtgcattgaagactgtgcatgttcaggtgctggaagttgtgcagggctttacactgcaaacagtatggcctgccttacagaagctttgggactctctcttccaatgtgtgcaacaacgcatgcagttgatgcccaaaaagttaggcttgctaaaaaaagtggctcaaaaattgttgatatggtaaaagaagacctaaaaccaacagacatattaacaaaagaagcttttgaaaatgctattttagttgaccttgcacttggtggatcaacaaacacaacattacacattcctgcaattgcaaatgaaattgaaaataaattcataactctcgatgactttgacaggttaagcgatgaagttccacacattgcatcaatcaaaccaggtggagaacactacatgattgatttacacaatgctggaggtattcctgcggtattgaacgttttaaaagaaaaaattagagatacaaaaacagttgatggaagaagcattttggaaatcgcagaatctgttaaatacataaattacgacgttataagaaaagtggaagctccggttcacgaaactgctggtttaagggttttaaagggaaatcttgctccaaacggttgcgttgtaaaaatcggtgcagtacatccgaaaatgtacaaacacgatggacctgcaaaagtttacaattccgaagatgaagcaatttctgcgatacttggcggaaaaattgtagaaggggacgttatagtaatcagatacgaaggaccatcaggaggccctggaatgagagaaatgctctccccaacttcagcaatctgtggaatgggtcttgatgacagcgttgcattgattactgatggaagattcagtggtggaagtaggggcccatgtatcggacacgtttctccagaagctgcagctggcggagtaattgctgcaattgaaaacggggatatcatcaaaatcgacatgattgaaaaagaaataaatgttgatttagatgaatcagtcattaaagaaagactctcaaaactgggagaatttgagcctaaaatcaaaaaaggctatttatcaagatactcaaaacttgtctcatctgctgacgaaggggcagttttaaaataa

SEQ ID NO: 61 - protein, 558 aa, Bacillus subtilis
MAELRSNMITQGIDRAPHRSLLRAAGVKEEDFGKPFIAVCNSYIDIVPGHVHLQEFGKIVKEAIREAGGVPFEFNTIGVDDGIAMGHIGMRYSLPSREIIADSVETVVSAHWFDGMVCIPNCDKITPGMLMAAMRINIPTIFVSGGPMAAGRTSDGRKISLSSVFEGVGAYQAGKINENELQELEQFGCPTCGSCSGMFTANSMNCLSEALGLALPGNGTILATSPERKEFVRKSAAQLMETIRKDIKPRDIVTVKAIDNAFALDMALGGSTNTVLHTLALANEAGVEYSLERINEVAERVPHLAKLAPASDVFIEDLHEAGGVSAALNELSKKEGALHLDALTVTGKTLGETIAGHEVKDYDVIHPLDQPFTEKGGLAVLFGNLAPDGAIIKTGGVQNGITRHEGPAVVFDSQDEALDGIINRKVKEGDVVIIRYEGPKGGPGMPEMLAPTSQIVGMGLGPKVALITDGRFSGASRGLSIGHVSPEAAEGGPLAFVENGDHIIVDIEKRILDVQVPEEEWEKRKANWKGFEPKVKTGYLARYSKLVTSANTGGIMKI

SEQ ID NO: 62 - DNA, 1677 bp, Bacillus subtilis
atggcagaattacgcagtaatatgatcacacaaggaatcgatagagctccgcaccgcagtttgcttcgtgcagcaggggtaaaagaagaggatttcggcaagccgtttattgcggtgtgtaattcatacattgatatcgttcccggtcatgttcacttgcaggagtttgggaaaatcgtaaaagaagcaatcagagaagcagggggcgttccgtttgaatttaataccattggggtagatgatggcatcgcaatggggcatatcggtatgagatattcgctgccaagccgtgaaattatcgcagactctgtggaaacggttgtatccgcacactggtttgacggaatggtctgtattccgaactgcgacaaaatcacaccgggaatgcttatggcggcaatgcgcatcaacattccgacgatttttgtcagcggcggaccgatggcggcaggaagaacaagttacgggcgaaaaatctccctttcctcagtattcgaaggggtaggcgcctaccaagcagggaaaatcaacgaaaacgagcttcaagaactagagcagttcggatgcccaacgtgcgggtcttgctcaggcatgtttacggcgaactcaatgaactgtctgtcagaagcacttggtcttgctttgccgggtaatggaaccattctggcaacatctccggaacgcaaagagtttgtgagaaaatcggctgcgcaattaatggaaacgattcgcaaagatatcaaaccgcgtgatattgttacagtaaaagcgattgataacgcgtttgcactcgatatggcgctcggaggttctacaaataccgttcttcatacccttgcccttgcaaacgaagccggcgttgaatactctttagaacgcattaacgaagtcgctgagcgcgtgccgcacttggctaagctggcgcctgcatcggatgtgtttattgaagatcttcacgaagcgggcggcgtttcagcggctctgaatgagctttcgaagaaagaaggagcgcttcatttagatgcgctgactgttacaggaaaaactcttggagaaaccattgccggacatgaagtaaaggattatgacgtcattcacccgctggatcaaccattcactgaaaagggaggccttgctgttttattcggtaatctagctccggacggcgctatcattaaaacaggcggcgtacagaatgggattacaagacacgaagggccggctgtcgtattcgattctcaggacgaggcgcttgacggcattatcaaccgaaaagtaaaagaaggcgacgttgtcatcatcagatacgaagggccaaaaggcggacctggcatgccggaaatgctggcgccaacatcccaaatcgttggaatgggactcgggccaaaagtggcattgattacggacggacgtttttccggagcctcccgtggcctctcaatcggccacgtatcacctgaggccgctgagggcgggccgcttgcctttgttgaaaacggagaccatattatcgttgatattgaaaaacgcatcttggatgtacaagtgccagaagaagagtgggaaaaacgaaaagcgaactggaaaggttttgaaccgaaagtgaaaaccggctacctggcacgttattctaaacttgtgacaagtgccaacaccggcggtattatgaaaatctag

SEQ ID NO: 63 - protein, 547 aa, Lactococcus lactis
MYTVGDYLLDRLHELGIEEIFGVPGDYNLQFLDQIISREDMKWIGNANELNASYMADGYARTKKAAAFLTTFGVGELSAINGLAGSYAENLPVVEIVGSPTSKVQNDGKFVHHTLADGDFKHFMKMHEPVTAARTLLTAENATYEIDRVLSQLLKERKPVYINLPVDVAAAKAEKPALSLEKESSTTNTTEQVILSKIEESLKNAQKPVVIAGHEVISFGLEKTVTQFVSETKLPITTLNFGKSAVDESLPSFLGIYNGKLSEISLKNFVESADFILMLGVKLTDSSTGAFTHHLDENKMISLNIDEGIIFNKVVEDFDFRAVVSSLSELKGIEYEGQYIDKQYEEFIPSSAPLSQDRLWQAVESLTQSNETIVAEQGTSFFGASTIFLKSNSRFIGQPLWGSIGYTFPAALGSQIADKESRHLLFIGDGSLQLTVQELGLSIREKLNPICFIINNDGYTVEREIHGPTQSYNDIPMWNYSKLPETFGATEDRVVSKIVRTENEFVSVMKEAQADVNRMYWIELVLEKEDAPKLLKKMGKLFAEQNK

SEQ ID NO: 64 - DNA, 1828 bp, Lactococcus lactis
tttaaataagtcaatatcgttgacttatttagaagaaagagttattctttaaatgtcaagttagttgactaaattaaatataaaatatggaggaatgtgatgtatacagtaggagattacctgttagaccgattacacgagttgggaattgaagaaatttttggagttcctggtgactataacttacaatttttagatcaaattatttcacgcgaagatatgaaatggattggaaatgctaatgaattaaatgcttcttatatggctgatggttatgctcgtactaaaaaagctgccgcatttctcaccacatttggagtcggcgaattgagtgcgatcaatggactggcaggaagttatgccgaaaatttaccagtagtagaaattgttggttcaccaacttcaaaagtacaaaatgacggaaaatttgtccatcatacactagcagatggtgattttaaacactttatgaagatgcatgaacctgttacagcagcgcggactttactgacagcagaaaatgccacatatgaaattgaccgagtactttctcaattactaaaagaaagaaaaccagtctatattaacttaccagtcgatgttgctgcagcaaaagcagagaagcctgcattatctttagaaaaagaaagctctacaacaaatacaactgaacaagtgattttgagtaagattgaagaaagtttgaaaaatgcccaaaaaccagtagtgattgcaggacacgaagtaattagttttggtttagaaaaaacggtaactcagtttgtttcagaaacaaaactaccgattacgacactaaattttggtaaaagtgctgttgatgaatctttgccctcatttttaggaatatataacgggaaactttcagaaatcagtcttaaaaattttgtggagtccgcagactttatcctaatgcttggagtgaagcttacggactcctcaacaggtgcattcacacatcatttagatgaaaataaaatgatttcactaaacatagatgaaggaataattttcaataaagtggtagaagattttgattttagagcagtggtttcttctttatcagaattaaaaggaatagaatatgaaggacaatatattgataagcaatatgaagaatttattccatcaagtgctcccttatcacaagaccgtctatggcaggcagttgaaagtttgactcaaagcaatgaaacaatcgttgctgaacaaggaacctcattttttggagcttcaacaattttcttaaaatcaaatagtcgttttattggacaacctttatggggttctattggatatacttttccagcggctttaggaagccaaattgcggataaagagagcagacaccttttatttattggtgatggttcacttcaacttaccgtacaagaattaggactatcaatcagagaaaaactcaatccaatttgttttatcataaataatgatggttatacagttgaaagagaaatccacggacctactcaaagttataacgacattccaatgtggaattactcgaaattaccagaaacatttggagcaacagaagatcgtgtagtatcaaaaattgttagaacagagaatgaatttgtgtctgtcatgaaagaagcccaagcagatgtcaatagaatgtattggatagaactagttttggaaaaagaagatgcgccaaaattactgaaaaaaatgggtaaattatttgctgagcaaaataaatagatatcaacggatgatgaaaagtaaaatagacaaagtccaataattttataaaaagtaaaaacattaggattttcctaatgttttt

SEQ ID NO: 65 - protein, 548 aa, Lactococcus lactis
MYTVGDYLLDRLHELGIEEIFGVPGDYNLQFLDQIISHKDMKWVGNANELNASYMADGYARTKKAAAFLTTFGVGELSAVNGLAGSYAENLPVVEIVGSPTSKVQNEGKFVHHTLADGDFKHFMKMHEPVTAARTLLTAENATVEIDRVLSALLKERKPVYINLPVDVAAAKAEKPSLPLKKENSTSNTSDQEILNKIQESLKNAKKPIVITGHEIISFGLEKTVTQFISKTKLPITTLNFGKSSVDEALPSFLGIYNGTLSEPNLKEFVESADFILMLGVKLTDSSTGAFTHHLNENKMISLNIDEGKIFNERIQNFDFESLISSLLDLSEIEYKGKYIDKKQEDFVPSNALLSQDRLWQAVENLTQSNETIVAEQGTSFFGASSIFLKSKSHFIGQPLWGSIGYTFPAALGSQIADKESRHLLFIGDGSLQLTVQELGLAIREKINPICFIINNDGYTVEREIHGPNQSYNDIPMWNYSKLPESFGATEDRVVSKIVRTENEFVSVMKEAQADPNRMYWIELILAKEGAPKVLKKMGKLFAEQNKS

SEQ ID NO: 66 - DNA, 1954 bp, Lactococcus lactis
ctagagttttctttagtcataattcactccttttattagtctattatacttgataattcaaataagtcaatatcgttgacttatttaaagaaaagcgttattctataaatgtcaagttgattgaccaatatataataaaatatggaggaatgcgatgtatacagtaggagattacctattagaccgattacacgagttaggaattgaagaaatttttggagtccctggagactataacttacaatttttagatcaaattatttcccacaaggatatgaaatgggtcggaaatgctaatgaattaaatgcttcatatatggctgatggctatgctcgtactaaaaaagctgccgcatttcttacaacctttggagtaggtgaattgagtgcagttaatggattagcaggaagttacgccgaaaatttaccagtagtagaaatagtgggatcacctacatcaaaagttcaaaatgaaggaaaatttgttcatcatacgctggctgacggtgattttaaacactttatgaaaatgcacgaacctgttacagcagctcgaactttactgacagcagaaaatgcaaccgttgaaattgaccgagtactttctgcactattaaaagaaagaaaacctgtctatatcaacttaccagttgatgttgctgctgcaaaagcagagaaaccctcactccctttgaaaaaggaaaactcaacttcaaatacaagtgaccaagaaattttgaacaaaattcaagaaagcttgaaaaatgccaaaaaaccaatcgtgattacaggacatgaaataattagttttggcttagaaaaaacagtcactcaatttatttcaaagacaaaactacctattacgacattaaactttggtaaaagttcagttgatgaagccctcccttcatttttaggaatctataatggtacactctcagagcctaatcttaaagaattcgtggaatcagccgacttcatcttgatgcttggagttaaactcacagactcttcaacaggagccttcactcatcatttaaatgaaaataaaatgatttcactgaatatagatgaaggaaaaatatttaacgaaagaatccaaaattttgattttgaatccctcatctcctctctcttagacctaagcgaaatagaatacaaaggaaaatatatcgataaaaagcaagaagactttgttccatcaaatgcgcttttatcacaagaccgcctatggcaagcagttgaaaacctaactcaaagcaatgaaacaatcgttgctgaacaagggacatcattctttggcgcttcatcaattttcttaaaatcaaagagtcattttattggtcaacccttatggggatcaattggatatacattcccagcagcattaggaagccaaattgcagataaagaaagcagacaccttttatttattggtgatggttcacttcaacttacagtgcaagaattaggattagcaatcagagaaaaaattaatccaatttgctttattatcaataatgatggttatacagtcgaaagagaaattcatggaccaaatcaaagctacaatgatattccaatgtggaattactcaaaattaccagaatcgtttggagcaacagaagatcgagtagtctcaaaaatcgttagaactgaaaatgaatttgtgtctgtcatgaaagaagctcaagcagatccaaatagaatgtactggattgagttaattttggcaaaagaaggtgcaccaaaagtactgaaaaaaatgggcaaactatttgctgaacaaaataaatcataatttataaatagtaaaaaacattaggaaatacctaatgtttttttgttgactaaatcaatccctctttatatagaaaaccttagtttctcaaagacaacttaattaagcctgccaaattggaactcgcaaaatgtaatctatcctctgctccta

SEQ ID NO: 67 - protein, 550 aa, Salmonella typhimurium
MQNPYTVADYLLDRLAGCGIGHLFGVPGDYNLQFLDHVIDHPTLRWVGCANELNAAYAADGYARMSGAGALLTTFGVGELSAINGIAGSYAEYVPVLHIVGAPCSAAQQRGELMHHTLGDGDFRHFYRMSQAISAASAILDEQNACFEIDRVLGEMLAARRPGYIMLPADVAKKTAIPPTQALALPVHEAQSGVETAFRYHARQCLMNSRRIALLADFLAGRFGLRPLLQRWMAETPIAHATLLMGKGLFDEQHPNFVGTYSAGASSKEVRQAIEDADRVICVGTRFVDTLTAGFTQQLPAERTLEIQPYASRIGETWFNLPMAQAVSTLRELCLECAFAPPPTRSAGQPVRIDKGELTQESFWQTLQQYLKPGDIILVDQGTAAFGAAALSLPDGAEVVLQPLWGSIGYSLPAAFGAQTACPDRRVILIIGDGAAQLTIQEMGSMLRDGQAPVILLLNNDGYTVERAIHGAAQRYNDIASWNWTQIPPALNAAQQAECWRVTQAIQLAEVLERLARPQRLSFIEVMLPKADLPELLRTVTRALEARNGG

SEQ ID NO: 68 - DNA, 1653 bp, Salmonella typhimurium
ttatcccccgttgcgggcttccagcgcccgggtcacggtacgcagtaattccggcagatcggcttttggcaacatcacttcaataaatgacagacgttgtgggcgcgccaaccgttcgaggacctctgccagttggatagcctgcgtcacccgccagcactccgcctgttgcgccgcgtttagcgccggtggtatctgcgtccagttccagctcgcgatgtcgttataccgctgggccgcgccgtgaatggcgcgctctacggtatagccgtcattgttgagcagcaggatgaccggcgcctgcccgtcgcgtaacatcgagcccatctcctgaatcgtgagctgcgccgcgccatcgccgataatcagaatcacccgccgatcgggacaggcggtttgcgcgccaaacgcggcgggcaaggaatagccgatagacccccacagcggctgtaacacaacttccgcgccgtcaggaagcgacagcgcggcagcgccaaaagctgctgtcccctggtcgacaaggataatatctccgggtttgagatactgctgtaaggtttgccagaagctttcctgggtcagttctcctttatcaatccgcactggctgtccggcggaacgcgtcggcggcggcgcaaaagcgcattccaggcacagttcgcgcagcgtagacaccgcctgcgccatcgggaggttgaaccaggtttcgccgatgcgcgacgcgtaaggctgaatctccagcgtgcgttccgccggtaattgttgggtaaatccggccgtaagggtatcgacaaaacgggtgccgacgcagataaccctatcggcgtcctctatggcctgacgcacttctttgctgctggcgccagcgctataggtgccaacgaagttcgggtgctgttcatcaaaaagccccttccccatcagtagtgtcgcatgagcgatgggcgtttccgccatccagcgctgcaacagtggtcgtaaaccaaaacgcccggcaagaaagtcggccaatagcgcaatgcgccgactgttcatcaggcactgacgggcgtgataacgaaaggccgtctccacgccgctttgcgcttcatgcacgggcaacgccagcgcctgcgtaggtgggatggccgtttttttcgccacatcggcgggcaacatgatgtatcctggcctgcgtgcggcaagcatttcacccaacacgcggtcaatctcgaaacaggcgttctgttcatctaatattgcgctggcagcggatatcgcctgactcatgcgataaaaatgacgaaaatcgccgtcaccgagggtatggtgcatcaattcgccacgctgctgcgcagcgctacagggcgcgccgacgatatgcaagaccgggacatattccgcgtaactgcccgcgataccgttaatagcgctaagttctcccacgccaaaggtggtgagtagcgctccagcgcccgacatgcgcgcatagccgtccgcggcataagcggcgttcagctcattggcgcatcccacccaacgcagggtcgggtggtcaatcacatggtcaagaaactgcaagttataatcgcccggtacgccaaaaagatggccaatgccgcatcctgccagtctgtccagcaaatagtcggccacggtataggggttttgcat

SEQ ID NO: 69 - protein, 554 aa, Clostridium acetobutylicum
MKSEYTIGRYLLDRLSELGIRHIFGVPGDYNLSFLDYIMEYKGIDWVGNCNELNAGYAADGYARINGIGAILTTFGVGELSAINAIAGAYAEQVPVVKITGIPTAKVRDNGLYVHHTLGDGRFDHFFEMFREVTVAEALLSEENAAQEIDRVLISCWRQKRPVLINLPIDVYDKPINKPLKPLLDYTISSNKEAACEFVTEIVPIINRAKKPVILADYGVYRYQVQHVLKNLAEKTGFPVATLSMGKGVFNEAHPQFIGVYNGDVSSPYLRQRVDEADCIISVGVKLTDSTTGGFSHGFSKRNVIHIDPFSIKAKGKKYAPITMKDALTELTSKIEHRNFEDLDIKPYKSDNQKYFAKEKPITQKRFFERIAHFIKEKDVLLAEQGTCFFGASTIQLPKDATFIGQPLWGSIGYTLPALLGSQLADQKRRNILLIGDGAFQMTAQEISTMLRLQIKPIIFLINNDGYTIERAIHGREQVYNNIQMWRYHNVPKVLGPKECSLTFKVQSETELEKALLVADKDCEHLIFIEVVMDRYDKPEPLERLSKRFANQNN

SEQ ID NO: 70 - DNA, 1665 bp, Clostridium acetobutylicum
ttgaagagtgaatacacaattggaagatatttgttagaccgtttatcagagttgggtattcggcatatctttggtgtacctggagattacaatctatcctttttagactatataatggagtacaaagggatagattgggttggaaattgcaatgaattgaatgctgggtatgctgctgatggatatgcaagaataaatggaattggagccatacttacaacatttggtgttggagaattaagtgccattaacgcaattgctggggcatacgctgagcaagttccagttgttaaaattacaggtatccccacagcaaaagttagggacaatggattatatgtacaccacacattaggtgacggaaggtttgatcacttttttgaaatgtttagagaagtaacagttgctgaggcattactaagcgaagaaaatgcagcacaagaaattgatcgtgttcttatttcatgctggagacaaaaacgtcctgttcttataaatttaccgattgatgtatatgataaaccaattaacaaaccattaaagccattactcgattatactatttcaagtaacaaagaggctgcatgtgaatttgttacagaaatagtacctataataaatagggcaaaaaagcctgttattcttgcagattatggagtatatcgttaccaagttcaacatgtgcttaaaaacttggccgaaaaaaccggatttcctgtggctacactaagtatgggaaaaggtgttttcaatgaagcacaccctcaatttattggtgtttataatggtgatgtaagttctccttatttaaggcagcgagttgatgaagcagactgcattattagcgttggtgtaaaattgacggattcaaccacagggggattttctcatggattttctaaaaggaatgtaattcacattgatcctttttcaataaaggcaaaaggtaaaaaatatgcacctattacgatgaaagatgctttaacagaattaacaagtaaaattgagcatagaaactttgaggatttagatataaagccttacaaatcagataatcaaaagtattttgcaaaagagaagccaattacacaaaaacgtttttttgagcgtattgctcactttataaaagaaaaagatgtattattagcagaacagggtacatgcttttttggtgcgtcaaccatacaactacccaaagatgcaacttttattggtcaacctttatggggatctattggatacacacttcctgctttattaggttcacaattagctgatcaaaaaaggcgtaatattcttttaattggggatggtgcatttcaaatgacagcacaagaaatttcaacaatgcttcgtttacaaatcaaacctattatttttttaattaataacgatggttatacaattgaacgtgctattcatggtagagaacaagtatataacaatattcaaatgtggcgatatcataatgttccaaaggttttaggtcctaaagaatgcagcttaacctttaaagtacaaagtgaaactgaacttgaaaaggctcttttagtggcagataaggattgtgaacatttgatttttatagaagttgttatggatcgttatgataaacccgagcctttagaacgtctttcgaaacgttttgcaaatcaaaataattag

SEQ ID NO: 71 - DNA, 1641 bp, Clostridium acetobutylicum
atgaaacaacgtatcgggcaatacttgatcgatgccctacacgttaatggtgtcgataagatctttggagtcccaggtgatttcactttagcctttttggacgatatcataagacatgacaacgtggaatgggtgggaaatactaatgagttgaacgccgcttacgccgctgatggttacgctagagttaatggattagccgctgtatctaccacttttggggttggcgagttatctgctgtgaatggtattgctggaagttacgcagagcgtgttcctgtaatcaaaatctcaggcggtccttcatcagttgctcaacaagagggtagatatgtccaccattcattgggtgaaggaatctttgattcatattcaaagatgtacgctcacataaccgcaacaactacaatcttatccgttgacaacgcagtcgacgaaattgatagagttattcattgtgctttgaaggaaaagaggccagtgcatattcatttgcctattgacgtagccttaactgagattgaaatccctcatgcaccaaaagtttacacacacgaatcccagaacgtcgatgcttacattcaagctgttgagaaaaagttaatgtctgcaaaacaaccagtaatcatagcaggtcatgaaatcaattcattcaagttgcacgaacaactggaacagtttgtcaatcagacaaacatccctgttgcacaactttccttgggtaagtctgctttcaatgaagagaatgaacattaccttggtatctacgatggcaaaatcgcaaaggaaaatgtgagagagtacgtcgacaatgctgatgtcatattgaacataggtgccaaactgactgattctgctacagctggattttcctacaagttcgatacaaacaacataatctacattaaccataatgacttcaaagctgaagatgtgatttctgataatgtttcactgattgatcttgtgaatggcctgaattctattgactatagaaatgaaacacactacccatcttatcaaagatctgatatgaaatacgaattgaatgacgcaccacttacacaatctaactatttcaaaatgatgaacgcttttctagaaaaagatgacatcctactagctgaacaaggtacatcctttttcggcgcatatgacttatccctatacaagggaaatcagtttatcggtcagcctttatgggggtcaatagggtatacttttccatctttactaggaagtcaactagcagacatgcataggagaaacattttgcttataggcgatggtagtttacaacttactgttcaagccctaagtacaatgattagaaaggatatcaaaccaatcattttcgttatcaataacgacggttacaccgtcgaaagacttatccacggcatggaagagccatacaatgatatccaaatgtggaactacaagcaattgccagaagtatttggtggaaaagatactgtaaaagttcatgatgctaaaacctccaacgaactgaaaactgtaatggattctgttaaagcagacaaagatcacatgcatttcattgaagtgcatatggcagtagaggacgccccaaagaagttgattgatatagctaaagcctttagtgatgctaacaagtaa

SEQ ID NO: 72 - DNA, 1647 bp, Listeria grayi
atgtacaccgtcggccaatacttagtagaccgcttagaagagatcggcatcgataaggtttttggtgtcccgggtgactacaacctgacctttttggactacatccagaaccacgaaggtctgagctggcaaggtaatacgaatgaactgaatgccgcgtacgcagctgatggctatgctcgtgaacgcggtgttagcgctttggtcacgaccttcggcgttggtgagctgtccgcaatcaatggcaccgcaggtagcttcgcggagcaagttccggtgattcatatcgtgggcagcccgaccatgaatgttcagagcaacaagaaactggttcatcacagcctgggtatgggcaactttcacaacttcagcgagatggcgaaagaagtcaccgccgcaaccacgatgctgacggaagagaatgcggcgtcggagattgatcgtgttctggaaaccgccctgctggagaaacgcccagtgtacatcaatctgccgatcgacattgctcacaaggcgatcgtcaagccggcgaaagccctgcaaaccgagaagagctctggcgagcgtgaggcacaactggcggagatcattctgagccatctggagaaggctgcacagccgattgtgattgcgggtcacgagatcgcgcgcttccagatccgtgagcgtttcgagaattggattaatcaaacgaaactgccggtgaccaatctggcctacggcaagggtagcttcaacgaagaaaacgagcatttcattggtacctattatcctgcatttagcgataagaacgtgctggactacgtggataactccgactttgtcctgcactttggtggtaaaatcattgataacagcacctccagcttctcccaaggcttcaaaaccgagaacaccctgactgcggcgaacgatatcattatgctgccggacggtagcacgtattctggtattagcctgaatggcctgctggccgagctggaaaaactgaatttcacgtttgccgacaccgcagcaaagcaggcggagttggcggtgtttgagccgcaggctgaaaccccgttgaaacaggaccgttttcaccaggcggtgatgaattttctgcaagctgacgatgtcctggttacggaacagggcacctcttcttttggcttgatgctggcgcctctgaaaaagggtatgaacttgatctcgcaaacgctgtggggtagcattggttacacgttgccggcgatgattggtagccaaattgcggcaccggagcgtcgtcatatcctgagcattggtgatggtagctttcagctgactgcgcaggaaatgagcaccattttccgtgagaaactgaccccagtcatcttcatcattaacaatgatggctataccgttgagcgtgcgatccatggcgaagatgaaagctataacgacattccgacgtggaacttgcaactggtggcggaaaccttcggtggtgacgccgaaaccgtcgacactcacaatgtgttcacggagactgatttcgccaacaccctggcggcaattgacgcgacgccgcagaaagcacacgttgtggaagttcacatggaacaaatggatatgccggagagcctgcgccagatcggtctggcactgtccaagcagaatagctaa

SEQ ID NO: 73 - protein, 312 aa, Saccharomyces cerevisiae
MPATLKNSSATLKLNTGASIPVLGFGTWRSVDNNGYHSVIAALKAGYRHIDAAAIYLNEEEVGRAIKDSGVPREEIFITTKLWGTEQRDPEAALNKSLKRLGLDYVDLYLMHWPVPLKTDRVTDGNVLCIPTLEDGTVDIDTKEWNFIKTWELMQELPKTGKTKAVGVSNFSINNIKELLESPNNKVVPATNQIEIHPLLPQDELIAFCKEKGIVVEAYSPFGSANAPLLKEQAIIDMAKKHGVEPAQLIISWSIQRGYVVLAKSVNPERIVSNFKIFTLPEDDFKTISNLSKVHGTKRVVDMKWGSFPIFQ

SEQ ID NO: 74 - DNA, 939 bp, Saccharomyces cerevisiae
atgcctgctacgttaaagaattcttctgctacattaaaactaaatactggtgcctccattccagtgttgggtttcggcacttggcgttccgttgacaataacggttaccattctgtaattgcagctttgaaagctggatacagacacattgatgctgcggctatctatttgaatgaagaagaagttggcagggctattaaagattccggagtccctcgtgaggaaatttttattactactaagctttggggtacggaacaacgtgatccggaagctgctctaaacaagtctttgaaaagactaggcttggattatgttgacctatatctgatgcattggccagtgcctttgaaaaccgacagagttactgatggtaacgttctgtgcattccaacattagaagatggcactgttgacatcgatactaaggaatggaattttatcaagacgtgggagttgatgcaagagttgccaaagacgggcaaaactaaagccgttggtgtctctaatttttctattaacaacattaaagaattattagaatctccaaataacaaggtggtaccagctactaatcaaattgaaattcatccattgctaccacaagacgaattgattgccttttgtaaggaaaagggtattgttgttgaagcctactcaccatttgggagtgctaatgctcctttactaaaagagcaagcaattattgatatggctaaaaagcacggcgttgagccagcacagcttattatcagttggagtattcaaagaggctacgttgttctggccaaatcggttaatcctgaaagaattgtatccaattttaagattttcactctgcctgaggatgatttcaagactattagtaacctatccaaagtgcatggtacaaagagagtcgttgatatgaagtggggatccttcccaattttccaatga

SEQ ID NO: 75 - protein, 360 aa, Saccharomyces cerevisiae
MSYPEKFEGIAIQSHEDWKNPKKTKYDPKPFYDHDIDIKIEACGVCGSDIHCAAGHWGNMKMPLVVGHEIVGKVVKLGPKSNSGLKVGQRVGVGAQVFSCLECDRCKNDNEPYCTKFVTTYSQPYEDGYVSQGGYANYVRVHEHFVVPIPENIPSHLAAPLLCGGLTVYSPLVRNGCGPGKKVGIVGLGGIGSMGTLISKAMGAETYVISRSSRKREDAMKMGADHYIATLEEGDWGEKYFDTFDLIVVCASSLTDIDFNIMPKAMKVGGRIVSISIPEQHEMLSLKPYGLKAVSISYSALGSIKELNQLLKLVSEKDIKIWVETLPVGEAGVHEAFERMEKGDVRYRFTLVGYDKEFSD

SEQ ID NO: 76 - DNA, 1083 bp, Saccharomyces cerevisiae
ctagtctgaaaattctttgtcgtagccgactaaggtaaatctatatctaacgtcacccttttccatcctttcgaaggcttcatggacgccggcttcaccaacaggtaatgtttccacccaaattttgatatctttttcagagactaatttcaagagttggttcaattctttgatggaacctaaagcactgtaagaaatggagacagcctttaagccatatggctttagcgataacatttcgtgttgttctggtatagagattgagacaattctaccaccaaccttcatagcctttggcataatgttgaagtcaatgtcggtaagggaggaagcacagactacaatcaggtcgaaggtgtcaaagtacttttcaccccaatcaccttcttctaatgtagcaatgtagtgatcggcgcccatcttcattgcatcttctctttttctcgaagaacgagaaataacatacgtctctgcccccatggctttggaaatcaatgtacccatactgccgataccaccaagaccaactataccaacttttttacctggaccgcaaccgttacgaaccaatggagagtacacagtcaaaccaccacataatagtggagcagccaaatgtgatggaatattctctgggataggcaccacaaaatgttcatgaactctgacgtagtttgcatagccaccctgcgacacatagccgtcttcataaggctgactgtatgtggtaacaaacttggtgcagtatggttcattatcattcttacaacggtcacattccaagcatgaaaagacttgagcacctacaccaacacgttgaccgactttcaacccactgtttgacttgggccctagcttgacaactttaccaacgatttcatgaccaacgactagcggcatcttcatattgccccaatgaccagctgcacaatgaatatcactaccgcagacaccacatgcttcgatcttaatgtcaatgtcatgatcgtaaaatggttttgggtcatactttgtcttctttgggtttttccaatcttcgtgtgattgaatagcgataccttcaaatttctcaggataagacat

SEQ ID NO: 77 - protein, 387 aa, Escherichia coli
MNNFNLHTPTRILFGKGAIAGLREQIPHDARVLITYGGGSVKKTGVLDQVLDALKGMDVLEFGGIEPNPAYETLMNAVKLVREQKVTFLLAVGGGSVLDGTKFIAAAANYPENIDPWHILQTGGKEIKSAIPMGCVLTLPATGSESNAGAVISRKTTGDKQAFHSAHVQPVFAVLDPVYTYTLPPRQVANGVVDAFVHTVEQYVTKPVDAKIQDRFAEGILLTLIEDGPKALKEPENYDVRANVMWAATQALNGLIGAGVPQDWATHMLGHELTAMHGLDHAQTLAIVLPALWNEKRDTKRAKLLQYAERVWNITEGSDDERIDAAIAATRNFFEQLGVPTHLSDYGLDGSSIPALLKKLEEHGMTQLGENHDITLDVSRRIYEAAR

SEQ ID NO: 78 - protein, 387 aa, Escherichia coli; identical to SEQ ID NO: 77

SEQ ID NO: 79 - protein, 389 aa, Clostridium acetobutylicum
MLSFDYSIPTKVFFGKGKIDVIGEEIKKYGSRVLIVYGGGSIKRNGIYDRATAILKENNIAFYELSGVEPNPRITTVKKGIEICRENNVDLVLAIGGGSAIDCSKVIAAGVYYDGDTWDMVKDPSKITKVLPIASILTLSATGSEMDQIAVISNMETNEKLGVGHDDMRPKFSVLDPTYTFTVPKNQTAAGTADIMSHTFESYFSGVEGAYVQDGIAEAILRTCIKYGKIAMEKTDDYEARANLMWASSLAINGLLSLGKDRKWSCHPMEHELSAYYDITHGVGLAILTPNWMEYILNDDTLHKFVSYGINVWGIDKNKDNYEIAREAIKNTREYFNSLGIPSKLREVGIGKDKLELMAKQAVRNSGGTIGSLRPINAEDVLEIFKKSY

SEQ ID NO: 80 - DNA, 1170 bp, Clostridium acetobutylicum
ttaataagattttttaaatatctcaagaacatcctctgcatttattggtcttaaacttcctattgttcctccagaatttctaacagcttgctttgccattagttctagtttatcttttcctattccaacttctctaagctttgaaggaatacccaatgaattaaagtattctctcgtatttttaatagcctctcgtgctatttcatagttatctttgttcttgtctattccccaaacatttattccataagaaacaaatttatgaagtgtatcgtcatttagaatatattccatccaattaggtgttaaaattgcaagtcctacaccatgtgttatatcataatatgcacttaactcgtgttccataggatgacaactccattttctatccttaccaagtgataatagaccatttatagctaaacttgaagcccacatcaaattagctctagcctcgtaatcatcagtcttctccattgctatttttccatactttatacatgttcttaagattgcttctgctataccgtcctgcacataagcaccttcaacaccactaaagtaagattcaaaggtgtgactcataatgtcagctgttcccgctgctgtttgatttttaggtactgtaaaagtatatgtaggatctaacactgaaaatttaggtctcatatcatcatgtcctactccaagcttttcattagtctccatatttgaaattactgcaatttgatccatttcagaccctgttgctgaaagagtaagtatacttgcaattggaagaactttagttattttagatggatctttaaccatgtcccatgtatcgccatcataataaactccagctgcaattaccttagaacagtctattgcacttcctccccctattgctaatactaaatccacattattttctctacatatttctatgcctttttttactgttgttatcctaggatttggctctactcctgaaagttcatagaaagctatattgttttcttttaatatagctgttgctctatcatatataccgttcctttttatacttcctccgccataaactataagcactcttgagccatatttcttaatttcttctccaattacgtctatttttccttttccaaaaaaaactttagttggtattgaataatcaaaacttagcat

SEQ ID NO: 81 - protein, 390 aa, Clostridium acetobutylicum
MVDFEYSIPTRIFFGKDKINVLGRELKKYGSKVLIVYGGGSIKRNGIYDKAVSILEKNSIKFYELAGVEPNPRVTTVEKGVKICRENGVEVVLAIGGGSAIDCAKVIAAACEYDGNPWDIVLDGSKIKRVLPIASILTIAATGSEMDTWAVINNMDTNEKLIAAHPDMAPKFSILDPTYTYTVPTNQTAAGTADIMSHIFEVYFSNTKTAYLQDRMAEALLRTCIKYGGIALEKPDDYEARANLMWASSLAINGLLTYGKDTNWSVHLMEHELSAYYDITHGVGLAILTPNWMEYILNNDTVYKFVEYGVNVWGIDKEKNHYDIAHQAIQKTRDYFVNVLGLPSRLRDVGIEEEKLDIMAKESVKLTGGTIGNLRPVNASEVLQIFKKSV

SEQ ID NO: 82 - DNA, 1173 bp, Clostridium acetobutylicum
gtggttgatttcgaatattcaataccaactagaatttttttcggtaaagataagataaatgtacttggaagagagcttaaaaaatatggttctaaagtgcttatagtttatggtggaggaagtataaagagaaatggaatatatgataaagctgtaagtatacttgaaaaaaacagtattaaattttatgaacttgcaggagtagagccaaatccaagagtaactacagttgaaaaaggagttaaaatatgtagagaaaatggagttgaagtagtactagctataggtggaggaagtgcaatagattgcgcaaaggttatagcagcagcatgtgaatatgatggaaatccatgggatattgtgttagatggctcaaaaataaaaagggtgcttcctatagctagtatattaaccattgctgcaacaggatcagaaatggatacgtgggcagtaataaataatatggatacaaacgaaaaactaattgcggcacatccagatatggctcctaagttttctatattagatccaacgtatacgtataccgtacctaccaatcaaacagcagcaggaacagctgatattatgagtcatatatttgaggtgtattttagtaatacaaaaacagcatatttgcaggatagaatggcagaagcgttattaagaacttgtattaaatatggaggaatagctcttgagaagccggatgattatgaggcaagagccaatctaatgtgggcttcaagtcttgcgataaatggacttttaacatatggtaaagacactaattggagtgtacacttaatggaacatgaattaagtgcttattacgacataacacacggcgtagggcttgcaattttaacacctaattggatggagtatattttaaataatgatacagtgtacaagtttgttgaatatggtgtaaatgtttggggaatagacaaagaaaaaaatcactatgacatagcacatcaagcaatacaaaaaacaagagattactttgtaaatgtactaggtttaccatctagactgagagatgttggaattgaagaagaaaaattggacataatggcaaaggaatcagtaaagcttacaggaggaaccataggaaacctaagaccagtaaacgcctccgaagtcctacaaatattcaaaaaatctgtgtaa

SEQ ID NO: 83 - protein, 330 aa, Bacillus subtilis
MSTNRHQALGLTDQEAVDMYRTMLLARKIDERMWLLNRSGKIPFVISCQGQEAAQVGAAFALDREMDYVLPYYRDMGVVLAFGMTAKDLMMSGFAKAADPNSGGRQMPGHFGQKKNRIVTGSSPVTTQVPHAVGIALAGRMEKKDIAAFVTFGEGSSNQGDFHEGANFAAVHKLPVIFMCENNKYAISVPYDKQVACENISDRAIGYGMPGVTVNGNDPLEVYQAVKEARERARRGEGPTLIETISYRLTPHSSDDDDSSYRGREEVEEAKKSDPLLTYQAYLKETGLLSDEIEQTMLDEIMAIVNEATDEAENAPYAAPESALDYVYAK

SEQ ID NO: 84 - DNA, 993 bp, Bacillus subtilis
atgagtacaaaccgacatcaagcactagggctgactgatcaggaagccgttgatatgtatagaaccatgctgttagcaagaaaaatcgatgaaagaatgtggctgttaaaccgttctggcaaaattccatttgtaatctcttgtcaaggacaggaagcagcacaggtaggagcggctttcgcacttgaccgtgaaatggattatgtattgccgtactacagagacatgggtgtcgtgctcgcgtttggcatgacagcaaaggacttaatgatgtccgggtttgcaaaagcagcagatccgaactcaggaggccgccagatgccgggacatttcggacaaaagaaaaaccgcattgtgacgggatcatctccggttacaacgcaagtgccgcacgcagtcggtattgcgcttgcgggacgtatggagaaaaaggatatcgcagcctttgttacattcggggaagggtcttcaaaccaaggcgatttccatgaaggggcaaactttgccgctgtccataagctgccggttattttcatgtgtgaaaacaacaaatacgcaatctcagtgccttacgataagcaagtcgcatgtgagaacatttccgaccgtgccataggctatgggatgcctggcgtaactgtgaatggaaatgatccgctggaagtttatcaagcggttaaagaagcacgcgaaagggcacgcagaggagaaggcccgacattaattgaaacgatttcttaccgccttacaccacattccagtgatgacgatgacagcagctacagaggccgtgaagaagtagaggaagcgaaaaaaagtgatcccctgcttacttatcaagcttacttaaaggaaacaggcctgctgtccgatgagatagaacaaaccatgctggatgaaattatggcaatcgtaaatgaagcgacggatgaagcggagaacgccccatatgcagctcctgagtcagcgcttgattatgtttatgcgaagtag

SEQ ID NO: 85 - protein, 327 aa, Bacillus subtilis
MSVMSYIDAINLAMKEEMERDSRVFVLGEDVGRKGGVFKATAGLYEQFGEERVMDTPLAESAIAGVGIGAAMYGMRPIAEMQFADFIMPAVNQIISEAAKIRYRSNNDWSCPIVVRAPYGGGVHGALYHSQSVEAIFANQPGLKIVMPSTPYDAKGLLKAAVRDEDPVLFFEHKRAYRLIKGEVPADDYVLPIGKADVKREGDDITVITYGLCVHFALQAAERLEKDGISAHVVDLRTVYPLDKEAIIEAASKTGKVLLVTEDTKEGSIMSEVAAIISEHCLFDLDAPIKRLAGPDIPAMPYAPTMEKYFMVNPDKVEAAMRELAEF

SEQ ID NO: 86 - DNA, 984 bp, Bacillus subtilis
atgtcagtaatgtcatatattgatgcaatcaatttggcgatgaaagaagaaatggaacgagattctcgcgttttcgtccttggggaagatgtaggaagaaaaggcggtgtgtttaaagcgacagcgggactctatgaacaatttggggaagagcgcgttatggatacgccgcttgctgaatctgcaatcgcaggagtcggtatcggagcggcaatgtacggaatgagaccgattgctgaaatgcagtttgctgatttcattatgccggcagtcaaccaaattatttctgaagcggctaaaatccgctaccgcagcaacaatgactggagctgtccgattgtcgtcagagcgccatacggcggaggcgtgcacggagccctgtatcattctcaatcagtcgaagcaattttcgccaaccagcccggactgaaaattgtcatgccatcaacaccatatgacgcgaaagggctcttaaaagccgcagttcgtgacgaagaccccgtgctgttttttgagcacaagcgggcataccgtctgataaagggcgaggttccggctgatgattatgtcctgccaatcggcaaggcggacgtaaaaagggaaggcgacgacatcacagtgatcacatacggcctgtgtgtccacttcgccttacaagctgcagaacgtctcgaaaaagatggcatttcagcgcatgtggtggatttaagaacagtttacccgcttgataaagaagccatcatcgaagctgcgtccaaaactggaaaggttcttttggtcacagaagatacaaaagaaggcagcatcatgagcgaagtagccgcaattatatccgagcattgtctgttcgacttagacgcgccgatcaaacggcttgcaggtcctgatattccggctatgccttatgcgccgacaatggaaaaatactttatggtcaaccctgataaagtggaagcggcgatgagagaattagcggagttttaa

SEQ ID NO: 87 - protein, 424 aa, Bacillus subtilis
MAIEQMTMPQLGESVTEGTISKWLVAPGDKVNKYDPIAEVMTDKVNAEVPSSFTGTITELVGEEGQTLQVGEMICKIETEGANPAEQKQEQPAASEAAENPVAKSAGAADQPNKKRYSPAVLRLAGEHGIDLDQVTGTGAGGRITRKDIQRLIETGGVQEQNPEELKTAAPAPKSASKPEPKEETSYPASAAGDKEIPVTGVRKAIASNMKRSKTEIPHAWTMMEVDVTNMVAYRNSIKDSFKKTEGFNLTFFAFFVKAVAQALKEFPQMNSMWAGDKIIQKKDINISIAVATEDSLFVPVIKNADEKTIKGIAKDITGLAKKVRDGKLTADDMQGGTFTVNNTGSFGSVQSMGIINYPQAAILQVESIVKRPVVMDNGMIAVRDMVNLCLSLDHRVLDGLVCGRFLGRVKQILESIDEKTSVY

SEQ ID NO: 88 - DNA, 1275 bp, Bacillus subtilis
atggcaattgaacaaatgacgatgccgcagcttggagaaagcgtaacagaggggacgatcagcaaatggcttgtcgcccccggtgataaagtgaacaaatacgatccgatcgcggaagtcatgacagataaggtaaatgcagaggttccgtcttcttttactggtacgataacagagcttgtgggagaagaaggccaaaccctgcaagtcggagaaatgatttgcaaaattgaaacagaaggcgcgaatccggctgaacaaaaacaagaacagccagcagcatcagaagccgctgagaaccctgttgcaaaaagtgctggagcagccgatcagcccaataaaaagcgctactcgccagctgttctccgtttggccggagagcacggcattgacctcgatcaagtgacaggaactggtgccggcgggcgcatcacacgaaaagatattcagcgcttaattgaaacaggcggcgtgcaagaacagaatcctgaggagctgaaaacagcagctcctgcaccgaagtctgcatcaaaacctgagccaaaagaagagacgtcatatcctgcgtctgcagccggtgataaagaaatccctgtcacaggtgtaagaaaagcaattgcttccaatatgaagcgaagcaaaacagaaattccgcatgcttggacgatgatggaagtcgacgtcacaaatatggttgcatatcgcaacagtataaaagattcttttaagaagacagaaggctttaatttaacgttcttcgccttttttgtaaaagcggtcgctcaggcgttaaaagaattcccgcaaatgaatagcatgtgggcgggggacaaaattattcagaaaaaggatatcaatatttcaattgcagttgccacagaggattctttatttgttccggtgattaaaaacgctgatgaaaaaacaattaaaggcattgcgaaagacattaccggcctagctaaaaaagtaagagacggaaaactcactgcagatgacatgcagggaggcacgtttaccgtcaacaacacaggttcgttcgggtctgttcagtcgatgggcattatcaactaccctcaggctgcgattcttcaagtagaatccatcgtcaaacgcccggttgtcatggacaatggcatgattgctgtcagagacatggttaatctgtgcctgtcattagatcacagagtgcttgacggtctcgtgtgcggacgattcctcggacgagtgaaacaaattttagaatcgattgacgagaagacatctgtttactaa

SEQ ID NO: 89 - protein, 474 aa, Bacillus subtilis
MATEYDVVILGGGTGGYVAAIRAAQLGLKTAVVEKEKLGGTCLHKGCIPSKALLRSAEVYRTAREADQFGVETAGVSLNFEKVQQRKQAVVDKLAAGVNHLMKKGKIDVYTGYGRILGPSIFSPLPGTISVERGNGEENDMLIPKQVIIATGSRPRMLPGLEVDGKSVLTSDEALQMEELPQSIIIVGGGVIGIEWASMLHDFGVKVTVIEYADRILPTEDLEISKEMESLLKKKGIQFITGAKVLPDTMTKTSDDISIQAEKDGETVTYSAEKMLVSIGRQANIEGIGLENTDIVTENGMISVNESCQTKESHIYAIGDVIGGLQLAHVASHEGIIAVEHFAGLNPHPLDPTLVPKCIYSSPEAASVGLTEDEAKANGHNVKIGKFPFMAIGKALVYGESDGFVKIVADRDTDDILGVHMIGPHVTDMISEAGLAKVLDATPWEVGQTIHPHPTLSEAIGEAALAADGKAIHF

SEQ ID NO: 90 - DNA, 1425 bp, Bacillus subtilis
atggcaactgagtatgacgtagtcattctgggcggcggtaccggcggttatgttgcggccatcagagccgctcagctcggcttaaaaacagccgttgtggaaaaggaaaaactcgggggaacatgtctgcataaaggctgtatcccgagtaaagcgctgcttagaagcgcagaggtataccggacagctcgtgaagccgatcaattcggagtggaaacggctggcgtgtccctcaactttgaaaaagtgcagcagcgtaagcaagccgttgttgataagcttgcagcgggtgtaaatcatttaatgaaaaaaggaaaaattgacgtgtacaccggatatggacgtatccttggaccgtcaatcttctctccgctgccgggaacaatttctgttgagcggggaaatggcgaagaaaatgacatgctgatcccgaaacaagtgatcattgcaacaggatcaagaccgagaatgcttccgggtcttgaagtggacggtaagtctgtactgacttcagatgaggcgctccaaatggaggagctgccacagtcaatcatcattgtcggcggaggggttatcggtatcgaatgggcgtctatgcttcatgattttggcgttaaggtaacggttattgaatacgcggatcgcatattgccgactgaagatctagagatttcaaaagaaatggaaagtcttcttaagaaaaaaggcatccagttcataacaggggcaaaagtgctgcctgacacaatgacaaaaacatcagacgatatcagcatacaagcggaaaaagacggagaaaccgttacctattctgctgagaaaatgcttgtttccatcggcagacaggcaaatatcgaaggcatcggcctagagaacaccgatattgttactgaaaatggcatgatttcagtcaatgaaagctgccaaacgaaggaatctcatatttatgcaatcggagacgtaatcggtggcctgcagttagctcacgttgcttcacatgagggaattattgctgttgagcattttgcaggtctcaatccgcatccgcttgatccgacgcttgtgccgaagtgcatttactcaagccctgaagctgccagtgtcggcttaaccgaagacgaagcaaaggcgaacgggcataatgtcaaaatcggcaagttcccatttatggcgattggaaaagcgcttgtatacggtgaaagcgacggttttgtcaaaatcgtggctgaccgagatacagatgatattctcggcgttcatatgattggcccgcatgtcaccgacatgatttctgaagcgggtcttgccaaagtgctggacgcaacaccgtgggaggtcgggcaaacgattcacccgcatccaacgctttctgaagcaattggagaagctgcgcttgccgcagatggcaaagccattcatttttaa

SEQ ID NO: 91 - protein, 410 aa, Pseudomonas putida
MNEYAPLRLHVPEPTGRPGCQTDFSYLRLNDAGQARKPPVDVDAADTADLSYSLVRVLDEQGDAQGPWAEDIDPQILRQGMRAMLKTRIFDSRMVVAQRQKKMSFYMQSLGEEAIGSGQALALNRTDMCFPTYRQQSILMARDVSLVEMICQLLSNERDPLKGRQLPIMYSVREAGFFTISGNLATQFVQAVGWAMASAIKGDTKIASAWIGDGATAESDFHTALTFAHVYRAPVILNVVNNQWAISTFQAIAGGESTTFAGRGVGCGIASLRVDGNDFVAVYAASRWAAERARRGLGPSLIEWVTYRAGPHSTSDDPSKYRPADDWSHFPLGDPIARLKQHLIKIGHWSEEEHQATTAEFEAAVIAAQKEAEQYGTLANGHIPSAASMFEDVYKEMPDHLRRQRQELGV

SEQ ID NO: 92 - DNA, 6643 bp, Pseudomonas putida
gcatgcctgcaggccgccgatgaaatggtggaaggtatcggtaggctggccctgctcatcgctgaacacgttacgcccgctgccggtatcgaccaggctctggtgaatatgcatggaactgccaggcgtgcgcgccagcggtttggccatgcacaccacggtcagcccgtgcttgagtgccacttccttgagcaggtgtttgaacaggaaggtctggtcggccagcagcagcgggtcgccatgtagcaagttgatctcgaactggctgacgcccatttcgtgcatgaaggtgtcgcgcggcaggccgagcgcggccatgcactggtacacctcattgaagaacgggcgcaggccgttgttggaactgacactgaacgccgaatggcccagctcgcggcggccgtcggtgcccagcggtggctggaacggctgctgcgggtcactgttgggggcaaacacgaagaactcaagctcggtcgccactaccggtgccagacccaacgctgcgtagcgggcgatcacggccttcagctggccccgggtggacagtgccgagggccggccatccagttcattggcatcgcagatggccagggcgcgaccgtcatcgctccagggcaagcgatgaacctggctgggttccgctaccaacgccaggtcgccgtcgtcgcagccgtagaatttcgccggcgggtagccgcccatgatgcattgcagcagcaccccacgggccatctgcaggcggcggccttcgagaaagccttcggcggtcatcaccttgccgcgtgggacgccgttgaggtcgggggtgacgcattcgatttcatcgatgccctggagctgagcgatgctcatgacgcttgtccttgttgttgtaggctgacaacaacataggctgggggtgtttaaaatatcaagcagcctctcgaacgcctggggcctcttctattcgcgcaaggtcatgccattggccggcaacggcaaggctgtcttgtagcgcacctgtttcaaggcaaaactcgagcggatattcgccacacccggcaaccgggtcaggtaatcgagaaaccgctccagcgcctggatactcggcagcagtacccgcaacaggtagtccgggtcgcccgtcatcaggtagcactccatcacctcgggccgttcggcaatttcttcctcgaagcggtgcagcgactgctctacctgtttttccaggctgacatggatgaacacattcacatccagccccaacgcctcgggcgacaacaaggtcacctgctggcggatcacccccagttcttccatggcccgcacccggttgaaacagggcgtgggcgacaggttgaccgagcgtgccagctcggcgttggtgatgcgggcgttttcctgcaggctgttgagaatgccgatatcggtacgatcgagtttgcgcatgagacaaaatcaccggttttttgtgtttatgcggaatgtttatctgccccgctcggcaaaggcaatcaacttgagagaaaaattctcctgccggaccactaagatgtaggggacgctgacttaccagtcacaagccggtactcagcggcggccgcttcagagctcacaaaaacaaatacccgagcgagcgtaaaaagcatgaacgagtacgcccccctgcgtttgcatgtgcccgagcccaccggccggccaggctgccagaccgatttttcctacctgcgcctgaacgatgcaggtcaagcccgtaaaccccctgtcgatgtcgacgctgccgacaccgccgacctgtcctacagcctggtccgcgtgctcgacgagcaaggcgacgcccaaggcccgtgggctgaagacatcgacccgcagatcctgcgccaaggcatgcgcgccatgctcaagacgcggatcttcgacagccgcatggtggttgcccagcgccagaagaagatgtccttctacatgcagagcctgggcgaagaagccatcggcagcggccaggcgctggcgcttaaccgcaccgacatgtgcttccccacctaccgtcagcaaagcatcctgatggcccgcgacgtgtcgctggtggagatgatctgccagttgctgtccaacgaacgcgaccccctcaagggccgccagctgccgatcatgtactcggtacgcgaggccggcttcttcaccatcagcggcaacctggcgacccagttcgtgcaggcggtcggctgggccatggcctcggcgatcaagggcgataccaagattgcctcggcctggatcggcgacggcgccactgccgaatcggacttccacaccgccctcacctttgcccacgtttaccgcgccccggtgatcctcaacgtggtcaacaaccagtgggccatctcaaccttccaggccatcgccggtggcgagtcgaccaccttcgccggccgtggcgtgggctgcggcatcgcttcgctgcgggtggacggcaacgacttcgtcgccgtttacgccgcttcgcgctgggctgccgaacgtgcccgccgtggtttgggcccgagcctgatcgagtgggtcacctaccgtgccggcccgcactcgacctcggacgacccgtccaagtaccgccctgccgatgactggagccacttcccgctgggtgacccgatcgcccgcctgaagcagcacctgatcaagatcggccactggtccgaagaagaacaccaggccaccacggccgagttcgaagcggccgtgattgctgcgcaaaaagaagccgagcagtacggcaccctggccaacggtcacatcccgagcgccgcctcgatgttcgaggacgtgtacaaggagatgcccgaccacctgcgccgccaacgccaggaactgggggtttgagatgaacgaccacaacaacagcatcaacccggaaaccgccatggccaccactaccatgaccatgatccaggccctgcgctcggccatggatgtcatgcttgagcgcgacgacaatgtggtggtgtacggccaggacgtcggctacttcggcggcgtgttccgctgcaccgaaggcctgcagaccaagtacggcaagtcccgcgtgttcgacgcgcccatctctgaaagcggcatcgtcggcaccgccgtgggcatgggtgcctacggcctgcgcccggtggtggaaatccagttcgctgactacttctacccggcctccgaccagatcgtttctgaaatggcccgcctgcgctaccgttcggccggcgagttcatcgccccgctgaccctgcgtatgccctgcggtggcggtatctatggcggccagacacacagccagagcccggaagcgatgttcactcaggtgtgcggcctgcgcaccgtaatgccatccaacccgtacgacgccaaaggcctgctgattgcctcgatcgaatgcgacgacccggtgatcttcctggagcccaagcgcctgtacaacggcccgttcgacggccaccatgaccgcccggttacgccgtggtcgaaacacccgcacagcgccgtgcccgatggctactacaccgtgccactggacaaggccgccatcacccgccccggcaatgacgtgagcgtgctcacctatggcaccaccgtgtacgtggcccaggtggccgccgaagaaagtggcgtggatgccgaagtgatcgacctgcgcagcctgtggccgctagacctggacaccatcgtcgagtcggtgaaaaagaccggccgttgcgtggtagtacacgaggccacccgtacttgtggctttggcgcagaactggtgtcgctggtgcaggagcactgcttccaccacctggaggcgccgatcgagcgcgtcaccggttgggacaccccctaccctcacgcgcaggaatgggcttacttcccagggccttcgcgggtaggtgcggcattgaaaaaggtcatggaggtctgaatgggcacgcacgtcatcaagatgccggacattggcgaaggcatcgcgcaggtcgaattggtggaatggttcgtcaaggtgggcgacatcatcgccgaggaccaagtggtagccgacgtcatgaccgacaaggccaccgtggaaatcccgtcgccggtcagcggcaaggtgctggccctgggtggccagccaggtgaagtgatggcggtcggcagtgagctgatccgcatcgaagtggaaggcagcggcaaccatgtggatgtgccgcaagccaagccggccgaagtgcctgcggcaccggtagccgctaaacctgaaccacagaaagacgttaaaccggcggcgtaccaggcgtcagccagccacgaggcagcgcccatcgtgccgcgccagccgggcgacaagccgctggcctcgccggcggtgcgcaaacgcgccctcgatgccggcatcgaattgcgttatgtgcacggcagcggcccggccgggcgcatcctgcacgaagacctcgacgcgttcatgagcaaaccgcaaagcgctgccgggcaaacccccaatggctatgccaggcgcaccgacagcgagcaggtgccggtgatcggcctgcgccgcaagatcgcccagcgcatgcaggacgccaagcgccgggtcgcgcacttcagctatgtggaagaaatcgacgtcaccgccctggaagccctgcgccagcagctcaacagcaagcacggcgacagccgcggcaagctgacactgctgccgttcctggtgcgcgccctggtcgtggcactgcgtgacttcccgcagataaacgccacctacgatgacgaagcgcagatcatcacccgccatggcgcggtgcatgtgggcatcgccacccaaggtgacaacggcctgatggtacccgtgctgcgccacgccgaagcgggcagcctgtgggccaatgccggtgagatttcacgcctggccaacgctgcgcgcaacaacaaggccagccgcgaagagctgtccggttcgaccattaccctgaccagcctcggcgccctgggcggcatcgtcagcacgccggtggtcaacaccccggaagtggcgatcgtcggtgtcaaccgcatggttgagcggcccgtggtgatcgacggccagatcgtcgtgcgcaagatgatgaacctgtccagctcgttcgaccaccgcgtggtcgatggcatggacgccgccctgttcatccaggccgtgcgtggcctgctcgaacaacccgcctgcctgttcgtggagtgagcatgcaacagactatccagacaaccctgttgatcatcggcggcggccctggcggctatgtggcggccatccgcgccgggcaactgggcatccctaccgtgctggtggaaggccaggcgctgggcggtacctgcctgaacatcggctgcattccgtccaaggcgctgatccatgtggccgagcagttccaccaggcctcgcgctttaccgaaccctcgccgctgggcatcagcgtggcttcgccacgcctggacatcggccagagcgtggcctggaaagacggcatcgtcgatcgcctgaccactggtgtcgccgccctgctgaaaaagcacggggtgaaggtggtgcacggctgggccaaggtgcttgatggcaagcaggtcgaggtggatggccagcgcatccagtgcgagcacctgttgctggccacgggctccagcagtgtcgaactgccgatgctgccgttgggtgggccggtgatttcctcgaccgaggccctggcaccgaaagccctgccgcaacacctggtggtggtgggcggtggctacatcggcctggagctgggtatcgcctaccgcaagctcggcgcgcaggtcagcgtggtggaagcgcgcgagcgcatcctgccgacttacgacagcgaactgaccgccccggtggccgagtcgctgaaaaagctgggtatcgccctgcaccttggccacagcgtcgaaggttacgaaaatggctgcctgctggccaacgatggcaagggcggacaactgcgcctggaagccgaccgggtgctggtggccgtgggccgccgcccacgcaccaagggcttcaacctggaatgcctggacctgaagatgaatggtgccgcgattgccatcgacgagcgctgccagaccagcatgcacaacgtctgggccatcggcgacgtggccggcgaaccgatgctggcgcaccgggccatggcccagggcgagatggtggccgagatcatcgccggcaaggcacgccgcttcgaacccgctgcgatagccgccgtgtgcttcaccgacccggaagtggtcgtggtcggcaagacgccggaacaggccagtcagcaaggcctggactgcatcgtcgcgcagttcccgttcgccgccaacggccgggccatgagcctggagtcgaaaagcggtttcgtgcgcgtggtcgcgcggcgtgacaaccacctgatcctgggctggcaagcggttggcgtggcggtttccgagctgtccacggcgtttgcccagtcgctggagatgggtgcctgcctggaggatgtggccggtaccatccatgcccacccgaccctgggtgaagcggtacaggaagcggcactgcgtgccctgggccacgccctgcatatctgacactgaagcggccgaggccgatttggcccgccgcgccgagaggcgctgcgggtcttttttatacctg

SEQ ID NO: 93 - protein, 352 aa, Pseudomonas putida
MNDHNNSINPETAMATTTMTMIQALRSAMDVMLERDDNVVVYGQDVGYFGGVFRCTEGLQTKYGKSRVFDAPISESGIVGTAVGMGAYGLRPVVEIQFADYFYPASDQIVSEMARLRYRSAGEFIAPLTLRMPCGGGIYGGQTHSQSPEAMFTQVCGLRTVMPSNPYDAKGLLIASIECDDPVIFLEPKRLYNGPFDGHHDRPVTPWSKHPHSAVPDGYYTVPLDKAAITRPGNDVSVLTYGTTVYVAQVAAEESGVDAEVIDLRSLWPLDLDTIVESVKKTGRCVVVHEATRTCGFGAELVSLVQEHCFHHLEAPIERVTGWDTPYPHAQEWAYFPGPSRVGAALKKVMEV

SEQ ID NO: 94 - DNA, 6643 bp, Pseudomonas putida; identical to SEQ ID NO: 92

SEQ ID NO: 95 - protein, 423 aa, Pseudomonas putida
MGTHVIKMPDIGEGIAQVELVEWFVKVGDIIAEDQVVADVMTDKATVEIPSPVSGKVLALGGQPGEVMAVGSELIRIEVEGSGNHVDVPQAKPAEVPAAPVAAKPEPQKDVKPAAYQASASHEAAPIVPRQPGDKPLASPAVRKRALDAGIELRYVHGSGPAGRILHEDLDAFMSKPQSAAGQTPNGYARRTDSEQVPVIGLRRKIAQRMQDAKRRVAHFSYVEEIDVTALEALRQQLNSKHGDSRGKLTLLPFLVRALVVALRDFPQINATYDDEAQIITRHGAVHVGIATQGDNGLMVPVLRHAEAGSLWANAGEISRLANAARNNKASREELSGSTITLTSLGALGGIVSTPVVNTPEVAIVGVNRMVERPVVIDGQIVVRKMMNLSSSFDHRVVDGMDAALFIQAVRGLLEQPACLFVE

SEQ ID NO: 96 - DNA, 6643 bp, Pseudomonas putida; identical to SEQ ID NO: 92

SEQ ID NO: 97 - protein, 459 aa, Pseudomonas putida
MQQTIQTTLLIIGGGPGGYVAAIRAGQLGIPTVLVEGQALGGTCLNIGCIPSKALIHVAEQFHQASRFTEPSPLGISVASPRLDIGQSVAWKDGIVDRLTTGVAALLKKHGVKVVHGWAKVLDGKQVEVDGQRIQCEHLLLATGSSSVELPMLPLGGPVISSTEALAPKALPQHLVVVGGGYIGLELGIAYRKLGAQVSVVEARERILPTYDSELTAPVAESLKKLGIALHLGHSVEGYENGCLLANDGKGGQLRLEADRVLVAVGRRPRTKGFNLECLDLKMNGAAIAIDERCQTSMHNVWAIGDVAGEPMLAHRAMAQGEMVAEIIAGKARRFEPAAIAAVCFTDPEVVVVGKTPEQASQQGLDCIVAQFPFAANGRAMSLESKSGFVRVVARRDNHLILGWQAVGVAVSELSTAFAQSLEMGACLEDVAGTIHAHPTLGEAVQEAALRALGHALHI

SEQ ID NO: 98 - DNA, 6643 bp, Pseudomonas putida; identical to SEQ ID NO: 92

SEQ ID NO: 99 - protein, 468 aa, Clostridium beijerinckii
MNKDTLIPTTKDLKLKTNVENINLKNYKDNSSCFGVFENVENAINSAVHAQKILSLHYTKEQREKIITEIRKAALENKEVLATMILEETHMGRYEDKILKHELVAKYTPGTEDLTTTAWSGDNGLTVVEMSPYGVIGAITPSTNPTETVICNSIGMIAAGNAVVFNGHPGAKKCVAFAIEMINKAIISCGGPENLVTTIKNPTMESLDAIIKHPLIKLLCGTGGPGMVKTLLNSGKKAIGAGAGNPPVIVDDTADIEKAGKSIIEGCSFDNNLPCIAEKEVFVFENVADDLISNMLKNNAVIINEDQVSKLIDLVLQKNNETQEYFINKKWVGKDAKLFSDEIDVESPSNIKCIVCEVNANHPFVMTELMMPILPIVRVKDIDEAVKYTKIAEQNRKHSAYIYSKNIDNLNRFEREIDTTIFVKNAKSFAGVGYEAEGFTTFTIAGSTGEGITSARNFTRQRRCVLAG

SEQ ID NO: 100 - DNA, 6558 bp, Clostridium beijerinckii
aagcttaaaatatccataggctattgttaataagactatagcgcttaatactctaagcgcaccatctaaaaaattatacataggaattggataaactccaatcttctccataatacttttcataggtgaaattgatattataattaaggctgcataaagcaaactcatatctccaataaatgtcactatcataggtaatttccttttcatgttcacatactcccccgtattctataataatttacaataaacttccatcacaaataaattataacatatattgtaaatatagttttattattcgcatatttatagataaacaatatataacttagacttatgcaataacctaccgaaagtaaaaacattgttatttcacaggactatgaaaatttcgctgaaagtactaaattgcaggttgcaccactaatgcttgctcccaatttcattgtgacaagcattagttgaacaacctacaattaagagcctttaacagctcatttccaatgcctgctacataaaaatgtttctactttctaatatggtatttacttcaaagtgtaaatcaaattcttaagttgtttatctatatagggttccatattgataacaatacatatctactgtttcaatttcatgaataccagcgatattgaaattttgtaagtttgaatatcattgtgaaaccctatatatcaaatacaatctcaaaattatacaaaaagatcccaacttcacaatatgaatttgagatcttctatcttaacttcttcaatatttttaagattatttatactgcgtgcaaatcttctataagtatcaattatcagctatgtacattgatagtggacttgtaatctgaacagcttatatatttacacttttaagttctcttccactaacccctgctttgaaacttctcataaacaaatcgaaagtacctttaattagctgtgcattctcaaactcagaatttaacttaagtacttcaattgccgcttcgatagtatagagctctccttctgaagcaccttttcttaaagtatattctgatttattaattggatttaatgaaattcttggaagcttctttaagtagtcgctctttcttagtatcttctctgcttctttccatgtgccatctaagataataaatgctggaattttttctgaatctttacatttagactttctttctagaggttcatcatcatccataggaaataatacacgtatttcataatcatcgctattaatatattcaattaatttttcaggagtctttactctctcccaaagaattaactcagttgattctggattcaccaatttcaataatctagcggtatttgaaggcctactaaattctctttctgttgataatatcaatatctttgcttttgtctctattttaggcacaatatcgcagatacaatttattattggcaacccacatttattgcagctctcatataacttagtaatttgcttaactttaaattcagactccattttacctccattattagttggttagtgtgtcatatcttcttgctattactaactgattataacatatgtattcaatatatcactcctagttttcaaagcactggcaatacgaattacaaattaatttctggatttatgtcagtatttcattaataaaaggtcggacttttaagatacttgttttagctattgatcatatttattaaagactatgcatttaatgtataattataatgaatattatcaataatatttattttatattacaatcttacagtctttattctaaatttcactcaaataccaaacgagctttattcataaacaatatataacaataattccaaaataatacgatattttatctgtaacagccatataaaaaaaatatcatatagtcttgtcatttgataacgttttgtcttccttatatttactttttcggtttaataggttgattctgtaaattttagtgataacatatatttgatgacattaaaaatttaatatttcatataaatttttaatgtctattaatttttaaatcacaaggaggaatagttcatgaataaagacacactaatacctacaactaaagatttaaaattaaaaacaaatgttgaaaacattaatttaaagaactacaaggataattcttcatgtttcggagtattcgaaaatgttgaaaatgctataaacagcgctgtacacgcgcaaaagatattatcccttcattatacaaaagaacaaagagaaaaaatcataactgagataagaaaggccgcattagaaaataaagaggttttagctaccatgattctggaagaaacacatatgggaaggtatgaagataaaatattaaagcatgaattagtagctaaatatactcctggtacagaagatttaactactactgcttggtcaggtgataatggtcttacagttgtagaaatgtctccatatggcgttataggtgcaataactccttctacgaatccaactgaaactgtaatatgtaatagcatcggcatgatagctgctggaaatgctgtagtatttaacggacacccaggcgctaaaaaatgtgttgcttttgctattgaaatgataaataaagcaattatttcatgtggcggtcctgagaatttagtaacaactataaaaaatccaactatggaatccctagatgcaattattaagcatcctttaataaaacttctttgcggaactggaggtccaggaatggtaaaaaccctcttaaattctggcaagaaagctataggtgctggtgctggaaatccaccagttattgtagatgataccgctgatatagaaaaggctggtaagagtatcattgaaggctgttcttttgataataatttaccttgtattgcagaaaaagaagtatttgtttttgagaatgttgcagatgatttaatatctaacatgctaaaaaataatgctgtaattataaatgaagatcaagtatcaaaattaatagatttagtattacaaaaaaataatgaaactcaagaatactttataaacaaaaaatgggtaggaaaagatgcaaaattattctcagatgaaatagatgttgagtctccttcaaatattaaatgcatagtctgcgaagtaaatgcaaatcatccatttgtcatgacagaactcatgatgccaatattaccaattgtaagagttaaagatatagatgaagctgttaaatatacaaagatagcagaacaaaatagaaaacatagtgcctatatttattctaaaaatatagacaacctaaatagatttgaaagagaaattgatactactatttttgtaaagaatgctaaatcttttgctggtgttggttatgaagctgaaggatttacaactttcactattgctggatctactggtgaaggcataacctctgcaagaaattttacaagacaaagaagatgtgtacttgccggctaacttcttgctaaatttatacatttattcacataactttaatatgcaatgttcccacaaaatattaaaaactatttagaagggagatattaaatgaataaattagtaaaattaacagatttaaagcgcattttcaaagatggtatgacaattatggttgggggttttttagattgtggaactcctgaaaatattatagatatgctagttgatttaaatataaaaaatctgactattataagcaatgatacagcttttcctaataaaggaataggaaaacttattgtaaatggtcaagtttctaaagtaattgcttcacatattggaactaatcctgaaactgggaaaaaaatgagctctggtgaacttaaagttgagctttctccacaaggaacactgatcgaaagaattcgtgcagctggatctggactcggaggtgtattaactccaaccggacttgggactatcgttgaagaaggtaagaaaaaagttactatcggtggcaaagaatatctattagaacttcctttatccgctgatgtttcattaataaaaggtagcattgtagatgaatttggaaataccttctatagagctgctactaaaaatttcaatccatatatggcaatggctgcaaaaacagttatagttgaagcagaaaatttagttaaatgtgaagatttaaaaagagatgccataatgactcctggcgtattagtagattatatcgttaaggaggcggcttaattgattgtagataaagttttagcaaaagagataattgccaaaagagttgcaaaagaactaaaaaaaggccaactcgtaaaccttggaataggacttccaactttagtagctaattatgtgccaaaagaaatgaacattactttcgaatcagaaaatggcatggttggcatggcacaaatggcctcatcaggtgaaaatgacccagatataataaatgctggtggggaatatgtaacattattacctcaaggtgcattttttgatagttcaacgtcttttgcactaataagaggaggacatgttgatgttgctgttcttggtgctctagaagttgatgaagaaggtaatttagctaactggattgttccaaataaaattgtcccaggtatgggaggcgccatggatttggcaataggcgcaaaaaaaataatagtggcaatgcaacatacaggaaaaggtaaacctaaaatcgtaaaaaaatgtactctcccacttactgctaaggctcaggtagatttaattgttacagaactttgtgtaattgatgtaacaaatgatggtttacttttcagagaaattcataaagatacaactattgatgaaataaaatttttaacagatgcagatttaattattcccgacaacttaaaaattatggatatctaaatcattctattttaaatatataactttaaaaatcttatgtattaaaaactaagaaaagaggttgattattttatgttagaaagtgaagtatctaaacaaattacaactccacttgctgctccagcgtttcctagaggaccatatagatttcacaatagagaatatctaaacattatttatcgaactgatttagatgctcttcgaaaaatagtaccagagccacttgaattagatggagcatatgttaggtttgagatgatggctatgcctgatacaaccggactaggctcatatactgagtgtggtcaagccattccagtaaaatataatgaggttaaaggtgactacttgcatatgatgtacctagataatgaacctgctattgctgttggaagagaaagcagtgcttatcccaaaaagttcggctatccaaagctatttgttgattcagacgccctagttggcgcccttaagtatggtgcattaccggtagttactgcgacgatgggatataagcatgagcccctagatcttaaagaagcctatactcaaattgcaagacccaatttcatgctaaaaatcattcaaggttatgatggtaagccaagaatttgtgaactcatctgtgcagaaaatactgatataactatccacggtgcttggactggaagtgcacgcctacaattatttagccatgcactagctcctcttgctgatttacctgtattagagatcgtatcagcatctcatatcctaacagatttaactcttggaacacctaaggttgtacatgattatctttcagtaaaataaaagcaatatagaataaccactacaaaagtagtggttattctatattttaaatcaaactgtaaaacttaagttttatagtacctaataatattttactaccagcattagattagttaaaatacaaagtttgtggtaaaagtattttagattgcataatagccttctatacttttaacaatataaccaattgctcaccatctgcttagaatatgcttctttaagctctaaaatacatataaaaaagtaggaatttcttattaaaattcctacttatattatatataaatttaatcgttaggttttattcgcattgttcctctttaatttatctcttataacattttattataattgttcatataattaattcaatatactattatatattttcaagcattaataattattcagcatctgtcattacatatgcttccatactttgacttcttattaaatcatagctaatccatccatagccattgattccccagtctttaccccatgaatttattatttttacagcttttttactatcatcataaccaactacgcaaactgcatgaccacctctattttctccatcaatctggtcataaattggattatcagaatttaaattatcaaaatctggatatactgatattccaataactactggatttccagctgctatttgtgcctttattgcattatagtcaccatctggaagttgactccaactttttgctttatatttggctgcattagccttttgttcatctgtaggtgtaacctcccaactatattcactaccatcataaggcatatcagataatgtagtacaaccttgttcttctaataatttaaatgcat

SEQ ID NO: 101 - protein, 862 aa, Clostridium acetobutylicum
MKVTTVKELDEKLKVIKEAQKKFSCYSQEMVDEIFRNAAMAAIDARIELAKAAVLETGMGLVEDKVIKNHFAGEYIYNKYKDEKTCGIIERNEPYGITKIAEPIGVVAAIIPVTNPTSTTIFKSLISLKTRNGIFFSPHPRAKKSTILAAKTILDAAVKSGAPENIIGWIDEPSIELTQYLMQKADITLATGGPSLVKSAYSSGKPAIGVGPGNTPVIIDESAHIKMAVSSIILSKTYDNGVICASEQSVIVLKSIYNKVKDEFQERGAYIIKKNELDKVREVIFKDGSVNPKIVGQSAYTIAAMAGIKVPKTTRILIGEVTSLGEEEPFAHEKLSPVLAMYEADNFDDALKKAVTLINLGGLGHTSGIYADEIKARDKIDRFSSAMKTVRTFVNIPTSQGASGDLYNFRIPPSFTLGCGFWGGNSVSENVGPKHLLNIKTVAERRENMLWFRVPHKVYFKFGCLQFALKDLKDLKKKRAFIVTDSDPYNLNYVDSIIKILEHLDIDFKVFNKVGREADLKTIKKATEEMSSFMPDTIIALGGTPEMSSAKLMWVLYEHPEVKFEDLAIKFMDIRKRIYTFPKLGKKAMLVAITTSAGSGSEVTPFALVTDNNTGNKYMLADYEMTPNMAIVDAELMMKMPKGLTAYSGIDALVNSIEAYTSVYASEYTNGLALEAIRLIFKYLPEAYKNGRTNEKAREKMAHASTMAGMASANAFLGLCHSMAIKLSSEHNIPSGIANALLIEEVIKFNAVDNPVKQAPCPQYKYPNTIFRYARIADYIKLGGNTDEEKVDLLINKIHELKKALNIPTSIKDAGVLEENFYSSLDRISELALDDQCTGANPRFPLTSEIKEMYINCFKKQP

SEQ ID NO: 102 - DNA, 1665 bp, Clostridium acetobutylicum; identical to SEQ ID NO: 70

SEQ ID NO: 103 - protein, 858 aa, Clostridium acetobutylicum
MKVTNQKELKQKLNELREAQKKFATYTQEQVDKIFKQCAIAAAKERINLAKLAVEETGIGLVEDKIIKNHFAAEYIYNKYKNEKTCGIIDHDDSLGITKVAEPIGIVAAIVPTTNPTSTAIFKSLISLKTRNAIFFSPHPRAKKSTIAAAKLILDAAVKAGAPKNIIGWIDEPSIELSQDLMSEADIILATGGPSMVKAAYSSGKPAIGVGAGNTPAIIDESADIDMAVSSIILSKTYDNGVICASEQSILVMNSIYEKVKEEFVKRGSYILNQNEIAKIKETMFKNGAINADIVGKSAYIIAKMAGIEVPQTTKILIGEVQSVEKSELFSHEKLSPVLAMYKVKDFDEALKKAQRLIELGGSGHTSSLYIDSQNNKDKVKEFGLAMKTSRTFINMPSSQGASGDLYNFAIAPSFTLGCGTWGGNSVSQNVEPKHLLNIKSVAERRENMLWFKVPQKIYFKYGCLRFALKELKDMNKKRAFIVTDKDLFKLGYVNKITKVLDEIDIKYSIFTDIKSDPTIDSVKKGAKEMLNFEPDTIISIGGGSPMDAAKVMHLLYEYPEAEIENLAINFMDIRKRICNFPKLGTKAISVAIPTTAGTGSEATPFAVITNDETGMKYPLTSYELTPNMAIIDTELMLNMPRKLTAATGIDALVHAIEAYVSVMATDYTDELALRAIKMIFKYLPRAYKNGTNDIEAREKMAHASNIAGMAFANAFLGVCHSMAHKLGAMHHVPHGIACAVLIEEVIKYNATDCPTKQTAFPQYKSPNAKRKYAEIAEYLNLKGTSDTEKVTALIEAISKLKIDLSIPQNISAAGINKKDFYNTLDKMSELAFDDQCTTANPRYPLISELKDIYIKSF

SEQ ID NO: 104 - DNA, 2589 bp, Clostridium acetobutylicum
atgaaagtcacaacagtaaaggaattagatgaaaaactcaaggtaattaaagaagctcaaaaaaaattctcttgttactcgcaagaaatggttgatgaaatctttagaaatgcagcaatggcagcaatcgacgcaaggatagagctagcaaaagcagctgttttggaaaccggtatgggcttagttgaagacaaggttataaaaaatcattttgcaggcgaatacatctataacaaatataaggatgaaaaaacctgcggtataattgaacgaaatgaaccctacggaattacaaaaatagcagaacctataggagttgtagctgctataatccctgtaacaaaccccacatcaacaacaatatttaaatccttaatatcccttaaaactagaaatggaattttcttttcgcctcacccaagggcaaaaaaatccacaatactagcagctaaaacaatacttgatgcagccgttaagagtggtgccccggaaaatataataggttggatagatgaaccttcaattgaactaactcaatatttaatgcaaaaagcagatataacccttgcaactggtggtccctcactagttaaatctgcttattcttccggaaaaccagcaataggtgttggtccgggtaacaccccagtaataattgatgaatctgctcatataaaaatggcagtaagttcaattatattatccaaaacctatgataatggtgttatatgtgcttctgaacaatctgtaatagtcttaaaatccatatataacaaggtaaaagatgagttccaagaaagaggagcttatataataaagaaaaacgaattggataaagtccgtgaagtgatttttaaagatggatccgtaaaccctaaaatagtcggacagtcagcttatactatagcagctatggctggcataaaagtacctaaaaccacaagaatattaataggagaagttacctccttaggtgaagaagaaccttttgcccacgaaaaactatctcctgttttggctatgtatgaggctgacaattttgatgatgctttaaaaaaagcagtaactctaataaacttaggaggcctcggccatacctcaggaatatatgcagatgaaataaaagcacgagataaaatagatagatttagtagtgccatgaaaaccgtaagaacctttgtaaatatcccaacctcacaaggtgcaagtggagatctatataattttagaataccaccttctttcacgcttggctgcggattttggggaggaaattctgtttccgagaatgttggtccaaaacatcttttgaatattaaaaccgtagctgaaaggagagaaaacatgctttggtttagagttccacataaagtatattttaagttcggttgtcttcaatttgctttaaaagatttaaaagatctaaagaaaaaaagagcctttatagttactgatagtgacccctataatttaaactatgttgattcaataataaaaatacttgagcacctagatattgattttaaagtatttaataaggttggaagagaagctgatcttaaaaccataaaaaaagcaactgaagaaatgtcctcctttatgccagacactataatagctttaggtggtacccctgaaatgagctctgcaaagctaatgtgggtactatatgaacatccagaagtaaaatttgaagatcttgcaataaaatttatggacataagaaagagaatatatactttcccaaaactcggtaaaaaggctatgttagttgcaattacaacttctgctggttccggttctgaggttactccttttgctttagtaactgacaataacactggaaataagtacatgttagcagattatgaaatgacaccaaatatggcaattgtagatgcagaacttatgatgaaaatgccaaagggattaaccgcttattcaggtatagatgcactagtaaatagtatagaagcatacacatccgtatatgcttcagaatacacaaacggactagcactagaggcaatacgattaatatttaaatatttgcctgaggcttacaaaaacggaagaaccaatgaaaaagcaagagagaaaatggctcacgcttcaactatggcaggtatggcatccgctaatgcatttctaggtctatgtcattccatggcaataaaattaagttcagaacacaatattcctagtggcattgccaatgcattactaatagaagaagtaataaaatttaacgcagttgataatcctgtaaaacaagccccttgcccacaatataagtatccaaacaccatatttagatatgctcgaattgcagattatataaagcttggaggaaatactgatgaggaaaaggtagatctcttaattaacaaaatacatgaactaaaaaaagctttaaatataccaacttcaataaaggatgcaggtgttttggaggaaaacttctattcctcccttgatagaatatctgaacttgcactagatgatcaatgcacaggcgctaatcctagatttcctcttacaagtgagataaaagaaatgtatataaattgttttaaaaaacaaccttaa

SEQ ID NO: 105 - protein, 307 aa, Pseudomonas putida
MSKKLKAAIIGPGNIGTDLVMKMLRSEWIEPVWMVGIDPNSDGLKRARDFGMKTTAEGVDGLLPHVLDDDIRIAFDATSAYVHAENSRKLNALGVLMVDLTPAAIGPYCVPPVNLKQHVGRLEMNVNMVTCGGQATIPMVAAVSRVQPVAYAEIVATVSSRSVGPGTRKNIDEFTRTTAGAIEQVGGAREGKAIIVINPAEPPLMMRDTIHCLTDSEPDQAAITASVHAMIAEVQKYVPGYRLKNGPVFDGNRVSIFMEVEGLGDYLPKYAGNLDIMTAAALRTGEMFAEEIAAGTIQLPRRDIALA

SEQ ID NO: 106 - DNA, 2180 bp, Pseudomonas putida
ggtacccctggagccggtcaaggccggcgacttcatgcgcgtcgagatcggcggcatcggcagcgcctccgtgcgcttcacctgatcgaacagaggacaaacccatgagcaagaaactcaaggcggccatcataggccccggcaatatcggtaccgatctggtgatgaagatgctccgttccgagtggattgagccggtgtggatggtcggcatcgaccccaactccgacggcctcaaacgcgcccgcgatttcggcatgaagaccacagccgaaggcgtcgacggcctgctcccgcacgtgctggacgacgacatccgcatcgccttcgacgccacctcggcctatgtgcatgccgagaatagccgcaagctcaacgcgcttggcgtgctgatggtcgacctgaccccggcggccatcggcccctactgcgtgccgccggtcaacctcaagcagcatgtcggccgcctggaaatgaacgtcaacatggtcacctgcggcggccaggccaccatccccatggtcgccgcggtgtcccgcgtgcagccggtggcctacgccgagatcgtcgccaccgtctcctcgcgctcggtcggcccgggcacgcgcaagaacatcgacgagttcacccgcaccaccgccggcgccatcgagcaggtcggcggcgccagggaaggcaaggcgatcatcgtcatcaacccggccgagccgccgctgatgatgcgcgacaccatccactgcctgaccgacagcgagccggaccaggctgcgatcaccgcttcggttcacgcgatgatcgccgaggtgcagaaatacgtgcccggctaccgcctgaagaacggcccggtgttcgacggcaaccgcgtgtcgatcttcatggaagtcgaaggcctgggcgactacctgcccaagtacgccggcaacctcgacatcatgaccgccgccgcgctgcgtaccggcgagatgttcgccgaggaaatcgccgccggcaccattcaactgccgcgtcgcgacatcgcgctggcttgaggagtagcaccatgaatttgcacggcaagagcgtcatcctgcacgacatgagcctgcgcgacggcatgcacgccaagcgccaccagatcagcctggagcagatggtcgcggtcgccaccggcctcgatcaagccggtatgccgctgatcgagatcacccacggcgacggcctcggcggtcgttcgatcaactacggcttcccggcccacagtgacgaggagtacctgcgcgcggtgatcccgcagctcaagcaggccaaagtctcggcgctgctgctgcccggcatcggcaccgtcgaccacctgaagatggccctggactgcggcgtctcgactattcgcgtggccacccactgtaccgaggcggatgtctccgagcagcacatcggcatggcgcgcaagctgggggtcgacaccgtcggcttcctgatgatggcgcacatgatcagcgccgagaaagtcctggagcaggccaagctgatggaaagctatggtgccaactgcatctactgcaccgactcggccggctacatgctgcctgatgaagtcagcgagaaaatcggcctcctgcgcgccgagctgaacccggccaccgaagtcggcttccacggccaccacaacatgggcatggctatcgccaactcgctggccgccatcgaagccggtgccgcgcgcatcgacggctcggtcgccggcctcggcgccggtgccggcaacaccccgctggaagtgttcgtcgcagtgtgcaaacgcatgggcgtggagaccggcatcgacctgtacaagatcatggacgtggccgaggacctggtggtgccgatgatggatcagccgatccgcgtcgaccgcgacgccctgaccctgggctacgccggggtgtacagctcgttcctgctgttcgcccagcgcgccgagaagaaatatggcgtgtcggcccgcgacatcctggtcgaactgggccggcgcggcaccgtcggtggccaggaagacatgatcgaagacctcgccctggacatggcccgggcccgtcagcagcagaaggtgagcgcatgaaccgtaccctgacccgcgaacaggtgctggccctggccgagcacatcgaaaacgccgagctgaatgtccacgacatcggcaaggtgaccaacgattttcc

SEQ ID NO: 107 - protein, 307 aa, Thermus thermophilus
MSERVKVAILGSGNIGTDLMYKLLKNPGHMELVAVVGIDPKSEGLARARALGLEASHEGIAYILERPEIKIVFDATSAKAHVRHAKLLREAGKIAIDLTPAARGPYVVPPVNLKEHLDKDNVNLITCGGQATIPLVYAVHRVAPVLYAEMVSTVASRSAGPGTRQNIDEFTFTTARGLEAIGGAKKGKAIIILNPAEPPILMTNTVRCIPEDEGFDREAVVASVRAMEREVQAYVPGYRLKADPVFERLPTPWGERTVVSMLLEVEGAGDYLPKYAGNLDIMTASARRVGEVFAQHLLGKPVEEVVA

SEQ ID NO: 108 - DNA, 924 bp, Thermus thermophilus
atgtccgaaagggttaaggtagccatcctgggctccggcaacatcgggacggacctgatgtacaagctcctgaagaacccgggccacatggagcttgtggcggtggtggggatagaccccaagtccgagggcctggcccgggcgcgggccttagggttagaggcgagccacgaagggatcgcctacatcctggagaggccggagatcaagatcgtctttgacgccaccagcgccaaggcccacgtgcgccacgccaagctcctgagggaggcggggaagatcgccatagacctcacgccggcggcccggggcccttacgtggtgcccccggtgaacctgaaggaacacctggacaaggacaacgtgaacctcatcacctgcggggggcaggccaccatccccctggtctacgcggtgcaccgggtggcccccgtgctctacgcggagatggtctccacggtggcctcccgctccgcgggccccggcacccggcagaacatcgacgagttcaccttcaccaccgcccggggcctggaggccatcgggggggccaagaaggggaaggccatcatcatcctgaacccggcggaaccccccatcctcatgaccaacaccgtgcgctgcatccccgaggacgagggctttgaccgggaggccgtggtggcgagcgtccgggccatggagcgggaggtccaggcctacgtgcccggctaccgcctgaaggcggacccggtgtttgagaggcttcccaccccctggggggagcgcaccgtggtctccatgctcctggaggtggagggggcgggggactatttgcccaaatacgccggcaacctggacatcatgacggcttctgcccggagggtgggggaggtcttcgcccagcacctcctggggaagcccgtggaggaggtggtggcgtga

SEQ ID NO: 109 - protein, 417 aa, Escherichia coli
MTFSLFGDKFTRHSGITLLMEDLNDGLRTPGAIMLGGGNPAQIPEMQDYFQTLLTDMLESGKATDALCNYDGPQGKTELLTLLAGMLREKLGWDIEPQNIALTNGSQSAFFYLFNLFAGRRADGRVKKVLFPLAPEYIGYADAGLEEDLFVSARPNIELLPEGQFKYHVDFEHLHIGEETGMICVSRPTNPTGNVITDEELLKLDALANQHGIPLVIDNAYGVPFPGIIFSEARPLWNPNIVLCMSLSKLGLPGSRCGIIIANEKIITAITNMNGIISLAPGGIGPAMMCEMIKRNDLLRLSETVIKPFYYQRVQETIAIIRRYLPENRCLIHKPEGAIFLWLWFKDLPITTKQLYQRLKARGVLMVPGHNFFPGLDKPWPHTHQCMRMNYVPEPEKIEAGVKILAEEIERAWAESH

SEQ ID NO: 110 - protein, 417 aa, Escherichia coli; identical to SEQ ID NO: 109

SEQ ID NO: 111 - protein, 425 aa, Bacillus licheniformis
MKPPLSKIGEKMIEKTGVRAVMSDIQEVLAGGERSYINLSAGNPMILPGVSAMWKSALADLLDDDRFSSVIGQYGSSYGTDELIASVVRFFSERYSAGIRKENVLITAGSQQLFFLAINSFCGMGSGSVMKKALIPMLPDYSGYSGAALEREMIEGIPPLISKLDDHTFRYELDRKGFLERMRIGAVLLSRPNNPCGNILPKEDVAFISDACREANVPLFIDSAYAPPFPAIHFIDMEPIFNEQIIHCMSLSKAGLPGERIGIAIGPSRYIQAMEAFQSNAAIHSSRLGQYMAASVLNDGRLADVSLNEVRPYYRNKFMLLKETLLCKMPEDIKWYLHQGEGSLFGWLWFEDLPVTDAALYEYMKADGVIIVPGSSFFHRQSRRLAHSHQCIRISLTAADEDIIRGIDVLAKIAKGVYEKQVEYL

SEQ ID NO: 112 - DNA, 1278 bp, Bacillus licheniformis
ttataagtattcaacctgtttctcatatacacccttcgcaattttagctaaaacatcgattccccttataatatcttcatccgccgcggttaggctgattcgtatacactggtgtgaatgcgccaggcgccgggattgacggtgaaagaaagatgatccgggaacgataatgactccatccgctttcatatactcatacagcgctgcatcggtcaccggcaggtcttcaaaccacagccatccgaaaagcgatccttccccttgatgcagataccatttgatgtcttcaggcatcttgcataaaagcgtttccttgagcagcatgaatttattgcggtaatatggcctgacttcattcagcgacacgtcggcgaggcgcccgtcattcaatactgatgcagccatatactgccccagccttgaagaatggatcgccgcattcgactgaaaagcttccattgcctgaatataccgggacggcccgatggcgattccgatcctttcgccaggcaggccggcttttgaaaggctcatacagtgaatgatctgctcgttgaaaatcggttccatgtcgataaagtgaatcgccggaaaaggcggagcatatgcggaatcaatgaacagcggaacattcgcttctcggcatgcgtctgaaatgaatgctacatcttctttaggcaagatgtttccgcaaggattgttcgggcgcgatagcaagacagcaccgatgcgcatcctctctaaaaaccccttacggtcgagctcatatcgaaacgtatgatcatccaatttcgatatgagcggagggatcccctcaatcatctcccgctccagtgccgccccgctgtatcccgaatagtcaggcagcatcgggatcaaggcttttttcatcacagatccgcttcccattccgcaaaacgaattgatcgccagaaaaaacagctgctggcttccggctgtaatcaacacgttctcttttcgaatgccggcgctataccgctctgaaaagaagcggacaacacttgcaatcagttcatcggttccatagctcgatccgtattggccgatcaccgaagaaaacctgtcatcgtcaaggagatcggcaagagccgacttccacatggctgacacgccgggcaaaatcatcggattgcccgcacttaaattaatgtatgaccgttcaccgccggccaggacttcctgaatatcgctcatcacagccctgacccctgttttctcaatcattttctctccgattttgcttaatggcggcttcac

SEQ ID NO: 113 - protein, 309 aa, Escherichia coli
MTTKKADYIWFNGEMVRWEDAKVHVMSHALHYGTSVFEGIRCYDSHKGPVVFRHREHMQRLHDSAKIYRFPVSQSIDELMEACRDVIRKNNLTSAYIRPLIFVGDVGMGVNPPAGYSTDVIIAAFPWGAYLGAEALEQGIDAMVSSWNRAAPNTIPTAAKAGGNYLSSLLVGSEARRHGYQEGIALDVNGYISEGAGENLFEVKDGVLFTPPFTSSALPGITRDAIIKLAKELGIEVREQVLSRESLYLADEVFMSGTAAEITPVRSVDGIQVGEGRCGPVTKRIQQAFFGLFTGETEDKWGWLDQVNQ

SEQ ID NO: 114 - DNA, 1476 bp, Escherichia coli; identical to SEQ ID NO: 46

SEQ ID NO: 115 - protein, 376 aa, Saccharomyces cerevisiae
MTLAPLDASKVKITTTQHASKPKPNSELVFGKSFTDHMLTAEWTAEKGWGTPEIKPYQNLSLDPSAVVFHYAFELFEGMKAYRTVDNKITMFRPDMNMKRMNKSAQRICLPTFDPEELITLIGKLIQQDKCLVPEGKGYSLYIRPTLIGTTAGLGVSTPDRALLYVICCPVGPYYKTGFKAVRLEATDYATRAWPGGCGDKKLGANYAPCVLPQLQAASRGYQQNLWLFGPNNNITEVGTMNAFFVFKDSKTGKKELVTAPLDGTILEGVTRDSILNLAKERLEPSEWTISERYFTIGEVTERSKNGELLEAFGSGTAAIVSPIKEIGWKGEQINIPLLPGEQTGPLAKEVAQWINGIQYGETEHGNWSRVVTDLN

SEQ ID NO: 116 - protein, 376 aa, Saccharomyces cerevisiae; identical to SEQ ID NO: 115

SEQ ID NO: 117 - protein, 330 aa, Methanobacterium thermoautotrophicum
MRLWRALYRPPTITYPSKSPEVIIMSCEASGKIWLNGEMVEWEEATVHVLSHVVHYGSSVFEGIRCYRNSKGSAIFRLREHVKRLFDSAKIYRMDIPYTQEQICDAIVETVRENGLEECYIRPVVFRGYGEMGVHPVNCPVDVAVAAWEWGAYLGAEALEVGVDAGVSTWRRMAPNTMPNMAKAGGNYLNSQLAKMEAVRHGYDEAIMLDYHGYISEGSGENIFLVSEGEIYTPPVSSSLLRGITRDSVIKIARTEGVTVHEEPITREMLYIADEAFFTGTAAEITPIRSVDGIEIGAGRRGPVTKLLQDEFFRIIRAETEDSFGWLTYI

SEQ ID NO: 118 - DNA, 993 bp, Methanobacterium thermoautotrophicum
tcagatgtaggtgagccatccgaagctgtcctctgtctctgccctgattatcctgaagaactcatcctgcagcagctttgtaacgggaccccttcgcccggcacctatctctataccatcaactgatctgatgggtgttatctctgcggctgtacctgtgaagaaggcctcatctgcgatgtagagcatctccctggttatgggttcctcatgcacggtaacaccctcggtcctggctatctttattacggagtcccttgttatccccctcagaagggatgatgaaacagggggggtgtaaatttcaccctcactgacgaggaatatgttctccccgctaccctcacttatgtagccatggtagtccagcattatggcctcatcatagccgtgtctcacagcctccatcttggcaagctgtgagttgaggtagttaccgccggcctttgccatgttgggcattgtgtttggtgccatcctccgccaggttgaaacaccagcatcgacaccaacctcaagggcctctgcacccagataggccccccattcccaggcagccacagcgacgtccactgggcagttcaccgggtgaacacccatctcaccgtatcccctgaataccacgggtcttatatagcactcctcaagtccgttctccctgacggtctcaactatggcatcacatatctgctcctgggtgtagggtatgtccatccggtatatctttgcagaatcaaaaaggcgtttaacatgctcccgcaaacggaagatggctgaccccttactgttcctgtagcaccttattccctcaaagacagatgatccataatgcacaacatgtgagagtacgtggacggtggcttcttcccattcaaccatttcaccgtttaaccatatctttccactggcttcgcatgacatgataataacctcaggtgatttactaggataggttatggttggaggcctatataatgctctccataaccgcaa

SEQ ID NO: 119 - protein, 364 aa, Streptomyces coelicolor
MTDVNGAPADVLHTLFHSDQGGHEQVVLCQDRASGLKAVIALHSTALGPALGGTRFYPYASEAEAVADALNLARGMSYKNAMAGLDHGGGKAVIIGDPEQIKSEELLLAYGRFVASLGGRYVTACDVGTYVADMDVVARECRWTTGRSPENGGAGDSSVLTSFGVYQGMRAAAQHLWGDPTLRDRTVGIAGVGKVGHHLVEHLLAEGAHVVVTDVRKDVVRGITERHPSVVAVADTDALIRVENLDIYAPCALGGALNDDTVPVLTAKVVCGAANNQLAHPGVEKDLADRGILYAPDYVVNAGGVIQVADELHGFDFDRCKAKASKIYDTTLAIFARAKEDGIPPAAAADRIAEQRMAEARPRP

SEQ ID NO: 120 - DNA, 1095 bp, Streptomyces coelicolor
tcacggccggggacgggcctccgccatccgctgctcggcgatccggtcggccgccgcggccggcggaataccgtcctccttcgcacgtgcgaatatggccagcgtggtgtcgtagatcttcgaggccttcgccttgcaccggtcgaagtcgaacccgtgcagctcgtcggcgacctggatgacaccgccggcgttcaccacatagtccggcgcgtagaggatcccgcggtcggcgaggtccttctcgacgcccgggtgggcgagctggttgttggccgcgccgcacaccaccttggcggtcagcaccggcacggtgtcgtcgttcagcgcgccgccgagcgcgcagggcgcgtagatgtccaggttctccacccggatcagcgcgtcggtgtcggcgacggcgaccaccgacgggtgccgctccgtgatcccgcgcaccacgtccttgcgcacgtccgtgacgacgacgtgggcgccctcggcgagcaggtgctcgaccaggtggtggccgaccttgccgacgcccgcgatgccgacggtgcggtcgcgcagcgtcgggtcgccccacaggtgctgggcggcggcccgcatgccctggtagacgccgaaggaggtgagcacggaggagtcgcccgcgccgccgttctccggggaacgcccggtcgtccagcggcactcgcgggccacgacgtccatgtcggcgacgtaggtgccgacgtcgcacgcggtgacgtagcggccgcccagcgaggcgacgaaccggccgtaggcgaggagcagctcctcgctcttgatctgctccggatcgccgatgatcacggccttgccgccaccgtggtccagaccggccatggcgttcttgtacgacatcccgcgggcgaggttcagcgcgtcggcgacggcctccgcctcgctcgcgtacgggtagaagcgggtaccgccgagcgccgggcccagggcggtggagtggagggcgatcacggccttgaggccgctggcacggtcctggcagagcacgacttgctcatgtcccccctgatccgagtggaacagggtgtgcagtacatcagcaggtgcgccgtttacgtcggtcac

SEQ ID NO: 121 - protein, 364 aa, Bacillus subtilis
MELFKYMEKYDYEQLVFCQDEQSGLKAIIAIHDTTLGPALGGTRMWTYENEEAAIEDALRLARGMTYKNAAAGLNLGGGKTVIIGDPRKDKNEEMFRAFGRYIQGLNGRYITAEDVGTTVEDMDIIHDETDYVTGISPAFGSSGNPSPVTAYGVYRGMKAAAKAAFGTDSLEGKTIAVQGVGNVAYNLCRHLHEEGANLIVTDINKQSVQRAVEDFGARAVDPDDIYSQDCDIYAPCALGATINDDTIKQLKAKVIAGAANNQLKETRHGDQIHEMGIVYAPDYVINAGGVINVADELYGYNAERALKKVEGIYGNIERVLEISQRDGIPAYLAADRLAEERIERMRRSRSQFLQNGHSVLSRR

SEQ ID NO: 122 - protein, 364 aa, Bacillus subtilis; identical to SEQ ID NO: 121

SEQ ID NO: 123 - protein, 594 aa, Streptomyces viridifaciens
MSTSSASSGPDLPFGPEDTPWQKAFSRLRAVDGVPRVTAPSSDPREVYMDIPEIPFSKVQIPPDGMDEQQYAEAESLFRRYVDAQTRNFAGYQVTSDLDYQHLSHYLNRHLNNVGDPYESSSYTLNSKVLERAVLDYFASLWNAKWPHDASDPETYWGYVLTMGSSEGNLYGLWNARDYLSGKLLRRQHREAGGDKASVVYTQALRHEGQSPHAYEPVAFFSQDTHYSLTKAVRVLGIDTFHSIGSSRYPDENPLGPGTPWPTEVPSVDGAIDVDKLASLVRFFASKGYPILVSLNYGSTFKGAYDDVPAVAQAVRDICTEYGLDRRRVYHDRSKDSDFDERSGFWIHIDAALGAGYAPYLQMARDAGMVEEAPPVFDFRLPEVHSLTMSGHKWMGTPWACGVYMTRTGLQMTPPKSSEYIGAADTTFAGSRNGFSSLLLWDYLSRHSYDDLVRLAADCDRLAGYAHDRLLTLQDKLGMDLWVARSPQSLTVRFRQPCADIVRKYSLSCETVYEDNEQRTYVHLYAVPHLTRELVDELVRDLRQPGAFTNAGALEGEAWAGVIDALGRPDPDGTYAGALSAPASGPRSEDGGGS

SEQ ID NO: 124 - DNA, 1785 bp, Streptomyces viridifaciens
gtgtcaacttcctccgcttcttccgggccggacctccccttcgggcccgaggacacgccatggcagaaggccttcagcaggctgcgggcggtggatggcgtgccgcgcgtcaccgcgccgtccagtgatccgcgtgaggtctacatggacatcccggagatccccttctccaaggtccagatccccccggacggaatggacgagcagcagtacgcagaggccgagagcctcttccgccgctacgtagacgcccagacccgcaacttcgcgggataccaggtcaccagcgacctcgactaccagcacctcagtcactatctcaaccggcatctgaacaacgtcggcgatccctatgagtccagctcctacacgctgaactccaaggtccttgagcgagccgttctcgactacttcgcctccctgtggaacgccaagtggccccatgacgcaagcgatccggaaacgtactggggttacgtgctgaccatgggctccagcgaaggcaacctgtacgggttgtggaacgcacgggactatctgtcgggcaagctgctgcggcgccagcaccgggaggccggcggcgacaaggcctcggtcgtctacacgcaagcgctgcgacacgaagggcagagtccgcatgcctacgagccggtggcgttcttctcgcaggacacgcactactcgctcacgaaggccgtgcgggttctgggcatcgacaccttccacagcatcggcagcagtcggtatccggacgagaacccgctgggccccggcactccgtggccgaccgaagtgccctcggttgacggtgccatcgatgtcgacaaactcgcctcgttggtccgcttcttcgccagcaagggctacccgatactggtcagcctcaactacgggtcaacgttcaagggcgcctacgacgacgtcccggccgtggcacaggccgtgcgggacatctgcacggaatacggtctggatcggcggcgggtataccacgaccgcagtaaggacagtgacttcgacgagcgcagcggcttctggatccacatcgatgccgccctgggggcgggctacgctccctacctgcagatggcccgggatgccggcatggtcgaggaggcgccgcccgttttcgacttccggctcccggaggtgcactcgctgaccatgagcggccacaagtggatgggaacaccgtgggcatgcggtgtctacatgacacggaccgggctgcagatgaccccgccgaagtcgtccgagtacatcggggcggccgacaccaccttcgcgggctcccgcaacggcttctcgtcactgctgctgtgggactacctgtcccggcattcgtatgacgatctggtgcgcctggccgccgactgcgaccggctggccggctacgcccacgaccggttgctgaccttgcaggacaaactcggcatggatctgtgggtcgcccgcagcccgcagtccctcacggtgcgcttccgtcagccatgtgcagacatcgtccgcaagtactcgctgtcgtgtgagacggtctacgaagacaacgagcaacggacctacgtacatctctacgccgttccccacctcactcgggaactcgtggatgagctcgtgcgcgatctgcgccagcccggagccttcaccaacgctggtgcactggagggggaggcctgggccggggtgatcgatgccctcggccgcccggaccccgacggaacctatgccggcgccttgagcgctccggcttccggcccccgctccgaggacggcggcgggagctga

SEQ ID NO: 125 - protein, 440 aa, Alcaligenes denitrificans
MSAAKLPDLSHLWMPFTANRQFKANPRLLASAKGMYYTSFDGRQILDGTAGLWCVNAGHCREEIVSAIASQAGVMDYAPGFQLGHPLAFEAATAVAGLMPQGLDRVFFTNSGSESVDTALKIALAYHRARGEAQRTRLIGRERGYHGVGFGGISVGGISPNRKTFSGALLPAVDHLPHTHSLEHNAFTRGQPEWGAHLADELERIIALHDASTIAAVIVEPMAGSTGVLVPPKGYLEKLREITARHGILLIFDEVITAYGRLGEATAAAYFGVTPDLITMAKGVSNAAVPAGAVAVRREVHDAIVNGPQGGIEFFHGYTYSAHPLAAAAVLATLDIYRREDLFARARKLSAAFEEAAHSLKGAPHVIDVRNIGLVAGIELSPREGAPGARAAEAFQKCFDTGLMVRYTGDILAVSPPLIVDENQIGQIFEGIGKVLKEVA

SEQ ID NO: 126 - DNA, 1947 bp, Alcaligenes denitrificans
ttcgatggcgcgctgcacggcggccaccagctgctccaccaggggtgggcgcctgcccgcgcgcgcggtcgggctggaaatcgatcatggatgaatctatacagttgtcatgattgcaactatacagttagcccgttttgcggcaattgtatattttcattcgctcgtggacgtccgagaatcggtttgatcgcgccgcccgcccctttccgcgcagcggcgtttcttttcctccggagtctccccatgagcgctgccaaactgcccgacctgtcccacctctggatgccctttaccgccaaccggcagttcaaggcgaacccccgcctgctggcctcggccaagggcatgtactacacgtctttcgacggccgccagatcctggacggcacggccggcctgtggtgcgtgaacgccggccactgccgcgaagaaatcgtctccgccatcgccagccaggccggcgtcatggactacgcgccggggttccagctcggccacccgctggccttcgaggccgccaccgccgtggccggcctgatgccgcagggcctggaccgcgtgttcttcaccaattcgggctccgaatcggtggacaccgcgctgaagatcgccctggcctaccaccgcgcgcgcggcgaggcgcagcgcacccgcctcatcgggcgcgagcgcggctaccacggcgtgggcttcggcggcatttccgtgggcggcatctcgcccaaccgcaagaccttctccggcgcgctgctgccggccgtggaccacctgccgcacacccacagcctggaacacaacgccttcacgcgcggccagcccgagtggggcgcgcacctggccgacgagttggaacgcatcatcgccctgcacgacgcctccaccatcgcggccgtgatcgtcgagcccatggccggctccaccggcgtgctcgtcccgcccaagggctatctcgaaaaactgcgcgaaatcaccgcccgccacggcattctgctgatcttcgacgaagtcatcaccgcgtacggccgcctgggcgaggccaccgccgcggcctatttcggcgtaacgcccgacctcatcaccatggccaagggcgtgagcaacgccgccgttccggccggcgccgtcgcggtgcgccgcgaagtgcatgacgccatcgtcaacggaccgcaaggcggcatcgagttcttccacggctacacctactcggcccacccgctggccgccgccgccgtgctcgccacgctggacatctaccgccgcgaagacctgttcgcccgcgcccgcaagctgtcggccgcgttcgaggaagccgcccacagcctcaagggcgcgccgcacgtcatcgacgtgcgcaacatcggcctggtggccggcatcgagctgtcgccgcgcgaaggcgccccgggcgcgcgcgccgccgaagccttccagaaatgcttcgacaccggcctcatggtgcgctacacgggcgacatcctcgcggtgtcgcctccgctcatcgtcgacgaaaaccagatcggccagatcttcgagggcatcggcaaggtgctcaaggaagtggcttagggtgaacacgccctgagccggccccggcaggaaacgcgccgccgcgcggcggcgcgtccatcgaactcccgcatcgagcttttgcattcatgaagaaaatcacgcatttcatcaacggccagccccacgaaggccgcagcaaccgctacaccgagggcttcaacccggccacgggcgagtcgtctcctcgatctgcctgggcggggccgaagaagtggacctggccgtggcggccgcccgcgcggcctttcccgcctggtccgaaacgccggcgctcaagcgcgcgcgcgtgctgttcaacttcaaggcgctgctggacaagcaccaggacgagctggccgcgctcatcacgcgcgagcacggcaaggtgttttccga

SEQ ID NO: 127 - protein, 443 aa, Ralstonia eutropha
MDAAKTVIPDLDALWMPFTANRQYKAAPRLLASASGMYYTTHDGRQILDGCAGLWCVAAGHCRKEIAEAVARQAATLDYAPPFQMGHPLSFEAATKVAAIMPQGLDRIFFTNSGSESVDTALKIALAYHRARGEGQRTRFIGRERGYHGVGFGGMAVGGIGPNRKAFSANLMPGTDHLPATLNIAEAAFSKGQPTWGAHLADELERIVALHDPSTIAAVIVEPLAGSAGVLVPPVGYLDKLREITTKHGILLIFDEVITAFGRLGTATAAERFKVTPDLITMAKAINNAAVPMGAVAVRREVHDTVVNSAAPGAIELAHGYTYSGHPLAAAAAIATLDLYQRENLFGRAAELSPVFEAAVHSVRSAPHVKDIRNLGMVAGIELEPRPGQPGARAYEAFLKCLERGVLVRYTGDILAFSPPLIISEAQIAELFDTVKQALQEVQ

SEQ ID NO: 128 - DNA, 1341 bp, Ralstonia eutropha
atggccgactcacccaacaacctcgctcacgaacatccttcacttgaacactattggatgccttttaccgccaatcgccaattcaaagcgagccctcgtttactcgcccaagctgaaggtatgtattacacagatatcaatggcaacaaggtattagactctacagcgggcttatggtgttgtaatgctggccatggtcgccgtgagatcagtgaagccgtcagcaaacaaattcggcagatggattacgctccctccttccaaatgggccatcccatcgcttttgaactggccgaacgtttaaccgaactcagcccagaaggactcaacaaagtattctttaccaactcaggctctgagtcggttgataccgcgctaaaaatggctctttgctaccatagagccaatggccaagcgtcacgcacccgctttattggccgtgaaatgggttaccatggcgtaggatttggtgggatctcggtgggtggtttaagcaataaccgtaaagccttcagcggccagctattgcaaggcgtggatcacctgccccacaccttagacattcaacatgccgcctttagtcgtggcttaccgagcctcggtgctgaaaaagctgaggtattagaacaattagtcacactccatggcgccgaaaatattgccgccgttattgttgaacccatgtcaggttctgcaggggtaattttaccacctcaaggctacttaaaacgcttacgtgaaatcactaaaaaacacggcatcttattgattttcgatgaagtcattaccgcatttggccgtgtaggtgcagcattcgccagccaacgttggggcgttattccagacataatcaccacggctaaagccattaataatggcgccatccccatgggcgcagtgtttgtacaggattatatccacgatacttgcatgcaagggccaaccgaactgattgaatttttccacggttatacctattcgggccacccagtcgccgcagcagcagcactcgccacgctctccatctaccaaaacgagcaactgtttgagcgcagttttgagcttgagcggtatttcgaagaagccgttcatagcctcaaagggttaccgaatgtgattgatattcgcaacaccggattagtcgcgggtttccagctagcaccgaatagccaaggtgttggtaaacgcggatacagcgtgttcgagcattgtttccatcaaggcacactcgtgcgggcaacgggcgatattatcgccatgtccccaccactcattgttgagaaacatcagattgaccaaatggtaaatagccttagcgatgcaattcacgccgttggatga

SEQ ID NO: 129 - protein, 446 aa, Shewanella oneidensis
MADSPNNLAHEHPSLEHYWMPFTANRQFKASPRLLAQAEGMYYTDINGNKVLDSTAGLWCCNAGHGRREISEAVSKQIRQMDYAPSFQMGHPIAFELAERLTELSPEGLNKVFFTNSGSESVDTALKMALCYHRANGQASRTRFIGREMGYHGVGFGGISVGGLSNNRKAFSGQLLQGVDHLPHTLDIQHAAFSRGLPSLGAEKAEVLEQLVTLHGAENIAAVIVEPMSGSAGVILPPQGYLKRLREITKKHGILLIFDEVITAFGRVGAAFASQRWGVIPDIITTAKAINNGAIPMGAVFVQDYIHDTCMQGPTELIEFFHGYTYSGHPVAAAAALATLSIYQNEQLFERSFELERYFEEAVHSLKGLPNVIDIRNTGLVAGFQLAPNSQGVGKRGYSVFEHCFHQGTLVRATGDIIAMSPPLIVEKHQIDQMVNSLSDAIHAVG

SEQ ID NO: 130 - DNA, 1341 bp, Shewanella oneidensis; identical to SEQ ID NO: 128

SEQ ID NO: 131 - protein, 448 aa, Pseudomonas putida
MNMPETGPAGIASQLKLDAHWMPYTANRNFQRDPRLIVAAEGNYLVDDHGRKIFDALSGLWTCGAGHTRKEIADAVTRQLSTLDYSPAFQFGHPLSFQLAEKIAELVPGNLNHVFYTNSGSECADTALKMVRAYWRLKGQATKTKIIGRARGYHGVNIAGTSLGGVNGNRKMFGQLLDVDHLPHTVLPVNAFSKGLPEEGGIALADEMLKLIELHDASNIAAVIVEPLAGSAGVLPPPKGYLKRLREICTQHNILLIFDEVITGFGRMGAMTGSEAFGVTPDLMCIAKQVTNGAIPMGAVIASSEIYQTFMNQPTPEYAVEFPHGYTYSAHPVACAAGLAALDLLQKENLVQSAAELAPHFEKLLHGVKGTKNIVDIRNYGLAGAIQIAARDGDAIVRPYEAAMKLWKAGFYVRFGGDTLQFGPTFNTKPQELDRLFDAVGETLNLID

SEQ ID NO: 132 - DNA, 930 bp, Pseudomonas putida
atgaccacgaagaaagctgattacatttggttcaatggggagatggttcgctgggaagacgcgaaggtgcatgtgatgtcgcacgcgctgcactatggcacttcggtttttgaaggcatccgttgctacgactcgcacaaaggaccggttgtattccgccatcgtgagcatatgcagcgtctgcatgactccgccaaaatctatcgcttcccggtttcgcagagcattgatgagctgatggaagcttgtcgtgacgtgatccgcaaaaacaatctcaccagcgcctatatccgtccgctgatcttcgtcggtgatgttggcatgggagtaaacccgccagcgggatactcaaccgacgtgattatcgctgctttcccgtggggagcgtatctgggcgcagaagcgctggagcaggggatcgatgcgatggtttcctcctggaaccgcgcagcaccaaacaccatcccgacggcggcaaaagccggtggtaactacctctcttccctgctggtgggtagcgaagcgcgccgccacggttatcaggaaggtatcgcgctggatgtgaacggttatatctctgaaggcgcaggcgaaaacctgtttgaagtgaaagatggtgtgctgttcaccccaccgttcacctcctccgcgctgccgggtattacccgtgatgccatcatcaaactggcgaaagagctgggaattgaagtacgtgagcaggtgctgtcgcgcgaatccctgtacctggcggatgaagtgtttatgtccggtacggcggcagaaatcacgccagtgcgcagcgtagacggtattcaggttggcgaaggccgttgtggcccggttaccaaacgcattcagcaagccttcttcggcctcttcactggcgaaaccgaagataaatggggctggttagatcaagttaatcaataa

SEQ ID NO: 133 - protein, 566 aa, Streptomyces cinnamonensis
MDADAIEEGRRRWQARYDKARKRDADFTTLSGDPVDPVYGPRPGDTYDGFERIGWPGEYPFTRGLYATGYRGRTWTIRQFAGFGNAEQTNERYKMILANGGGGLSVAFDMPTLMGRDSDDPRSLGEVGHCGVAIDSAADMEVLFKDIPLGDVTTSMTISGPAVPVFCMYLVAAERQGVDPAVLNGTLQTDIFKEYIAQKEWLFQPEPHLRLIGDLMEHCARDIPAYKPLSVSGYHIREAGATAAQELAYTLADGFGYVELGLSRGLDVDVFAPGLSFFFDAHVDFFEEIAKFRAARRIWARWLRDEYGAKTEKAQWLRFHTQTAGVSLTAQQPYNNVVRTAVEALAAVLGGTNSLHTNALDETLALPSEQAAEIALRTQQVLMEETGVANVADPLGGSWYIEQLTDRIEADAEKIFEQIRERGRRACPDGQHPIGPITSGILRGIEDGWFTGEIAESAFQYQRSLEKGDKRVVGVNCLEGSVTGDLEILRVSHEVEREQVRELAGRKGRRDDARVRASLDAMLAAARDGSNMIAPMLEAVRAEATLGEICGVLRDEWGVYVEPPGF

SEQ ID NO: 134 - DNA, 4362 bp, Streptomyces cinnamonensis
tgaggcgctggatcgcctcggagagcagctggtaacggtccgcgtggtactcggccggggtgcagccgtccacgatgtgcgggatcgcgtcgggctcgaggatcaccagggcgggggcgtcgccgatcgcgtcggcgaacgtgtccacccagctccggtaggcctccgcactggccgcgccgcccgcggagtgctgaccgcagtcgcggtgcgggatgttgtacgcgacgagtacggcggtgcggtcctccttgaccgcgccccgcgtcgccttcgcgacgtcgggcgccggatcgtccccggccggccacacggccatggcccgttcggagatgcgcctgagcgtctcggcgtcctcggcgcggccctgttcctcccactgcctgacctggcgcgcggcggggctgtcggggtcgacccagaaggtgccggcggggggcccggcgctcgcggtggcgggcttgcgcacggccgcctcctccttcgtgccgtcggaccccgggtctgaggaggagcagcctgccgggagcccgagggcggcgagggccgcgagtgccgtgaacgtgcggagcagccggtgcatccagcccccttgggcgatggtgacagtgacggtcagtcagcccggcaatcgttacataaaggactattcaagctcttgtgccacaccgcctccggtgccgagcgcgaacccggcgggcaccagagccccgccgcggccgcggagccgtacgtacgaccgaattgcgagacggggctgaccaccatatgaccggcgggtaaggtcgatgccgtgccgaagccgctcagcctccccttcgatcccatcgcccgcgccgacgagctctggaagcagcgctggggatcggtcccggccatgggcgcgatcacctcgatcatgcgggcgcaccagatcctgctcgccgaggtcgacgcggtcgtcaagccgtacggactgaccttcgcgcgctacgaggcgctggtgctcctcaccttctcgcaggccggcgagttgccgatgtcgaagatcggcgagcggctcatggtgcacccgacctcggtcacgaacaccgtggaccgcctggtgaagtccggcctggtcgacaagcgcccgaaccccaacgacggccgcggcacgctcgcctccatcacggagaagggccgcgaggtcgtcgaggcggccacccgcgagctgatggcgatggacttcgggctcggggtgtacgacgcggaggagtgcggggagatcttcgcgatgctgcggcccctgcgggtggcggcgcgcgatttcgaggagcagtagggcccgcccggtgagaagtgggatcgggtcgtcccggtacgggcgggggcggcgaagatcgcgtgaaaagggcggttacgctcgtagccatgaaacgcagcgtgctgacccgctaccgggtgatggcctacgtcaccgccgtcatgctcctcatcctgtgcgcctgcatggtggccaagtacggcttcgacaagggcgagggtctgaccctcgtcgtgtcgcaggtgcacggcgtgctctacatcatctacctgatcttcgccttcgacctgggctccaaggcgaagtggccgttcggcaagctgctctgggtgctggtctcgggcacgatcccgaccgccgccttcttcgtcgagcgcaaggtcgcccgtgacgtcgagccgctgatcgccgacggctccccggtcaccgcgaaggcgtaacccgcaccgccacggacaggtccgtggcggttggccatcgacttttactaggacgtcctagtaaattcgatggtatggacgctgacgcgatcgaggaaggccgccgacgctggcaggcccgttacgacaaggcccgcaagcgcgacgcggacttcaccacgctctccggggaccccgtcgaccccgtctacggcccccggcccggggacacgtacgacgggttcgagcggatcggctggccgggggagtaccccttcacccgcgggctctacgccaccgggtaccgcggccgcacctggaccatccgccagttcgccggcttcggcaacgccgagcagacgaacgagcgctacaagatgatcctggccaacggcggcggcggcctctccgtcgccttcgacatgccgaccctcatgggccgcgactccgacgacccgcgctcgctcggcgaggtcggccactgcggtgtcgccatcgactccgccgccgacatggaggtcctcttcaaggacatcccgctcggcgacgtcacgacgtccatgaccatcagcgggcccgccgtgcccgtcttctgcatgtacctcgtcgcggccgagcgccagggcgtcgacccggccgtcctcaacggcacgctgcagaccgacatcttcaaggagtacatcgcccagaaggagtggctcttccagcccgagccgcacctgcgcctcatcggcgacctgatggagcactgcgcgcgcgacatccccgcgtacaagccgctctcggtctccggctaccacatccgcgaggccggggcgacggccgcgcaggagctcgcgtacaccctcgcggacggcttcgggtacgtggaactgggcctctcgcgcggcctggacgtggacgtcttcgcgcccggcctctccttcttcttcgacgcgcacgtcgacttcttcgaggagatcgcgaagttccgcgccgcacgccgcatctgggcgcgctggctccgggacgagtacggagcgaagaccgagaaggcacagtggctgcgcttccacacgcagaccgcgggggtctcgctcacggcccagcagccgtacaacaacgtggtgcggacggcggtggaggccctcgccgcggtgctcggcggcacgaactccctgcacaccaacgctctcgacgagacccttgccctccccagcgagcaggccgcggagatcgcgctgcgcacccagcaggtgctgatggaggagaccggcgtcgccaacgtcgcggacccgctgggcggctcctggtacatcgagcagctcaccgaccgcatcgaggccgacgccgagaagatcttcgagcagatcagggagcgggggcggcgggcctgccccgacgggcagcacccgatcgggccgatcacctccggcatcctgcgcggcatcgaggacggctggttcaccggcgagatcgccgagtccgccttccagtaccagcggtccctggagaagggcgacaagcgggtcgtcggcgtcaactgcctcgaaggctccgtcaccggcgacctggagatcctgcgcgtcagccacgaggtcgagcgcgagcaggtgcgggagcttgcggggcgcaaggggcggcgtgacgatgcgcgggtgcgggcctcgctcgacgcgatgctcgccgctgcgcgggacgggtcgaacatgattgcccccatgctggaggcggtgcgggccgaggcgaccctcggggagatctgcggggtgcttcgcgatgagtggggggtctacgtggagccgcccgggttctgagggcgcgctccctttgcctgcgggtctgctgtggctggtcgcgcagttccccgcacccctgaaagaccccggcgctttcccttcctggctcgcctcgtcgctgtctgcggggccgtgggggctggtcgcgcagttccccgcgcccctgcccgcacctgcgccccgccgcctgcatgccgcccccaccctgacgggggcgttcggggcccaccctgacgggtgcggtcggggcgtgccggggtcttttaggggcgcggggaactgcgcgagcaacccccacccacccgcaggtgcacgcggagcggcggacgccccgcagacgggggcaaaacgggcggagtgcccccgcccgccgggcggcgcgaattcgtaggtttaaggggcaggggtcagggcaggcgccgagccggtcaaccgcccccgtcccaggagaccccgtgacctcgaccggccacgcccgcaccgccgccatcgccatcggagccgccaccgccaccgtcctcggcgcgctgctggtcggcggctccggcgaggtgagtgcgagcccgccgcccgagcccaaggtccaggacgacttcgactccctcggccccgaggtgcgcgccgcgaagctctccgacgggcggacggcccactactcggacacgggcgacaaggacggcaagccggccctgttcatcggcggcaccggcacgagcgcccgcgcctcccacatgaccgacttcttccgctcgacgcgcgaggacctgggcctgcgcctcatctccgtggagcgcaacggcttcggcgacaccgcgttcgacgagaagctgggcaccgccgacttcgcgaaggacgccctcgaagtcctcgaccggctcgg

SEQ ID NO: 135 - protein, 136 aa, Streptomyces cinnamonensis
MGVAAGPIRVVVAKPGLDGHDRGAKVIARALRDAGMEVIYTGLHQTPEQVVDTAIQEDADAIGLSILSGAHNTLFARVLELLKERDAEDIKVFGGGIIPEADIAPLKEKGVAEIFTPGATTTSIVEWVRGNVRQAV

SEQ ID NO: 136 - DNA, 1643 bp, Streptomyces cinnamonensis
gtcgacctcccgtttggcgcacggaagggaggctctgtcccccgtgtgccctagggggagtcgtggtcgaggagtcggctgtgcgatggcgatcccggccaccgccctgcggtgactccgtgcccccgttgcatcgccgatgcgcggtgtcaccacgccgtgcggctgccggcgcggtggcccggcgtctcgttgcggctcccctcgcgcctggtccggatgcggagcgtgaacccctgggttacggacgggcgcgcagcgaacgtgtcccacgtgtgatttccccctcgctctccaccgcgaaactgccgcttgcgcgatgctggggataacgttcgttcacttccccggccggtgcggtgcggggtatctgtgccgggacagactttgtcggtacggatatcggtacatggaggcagtgatgggtgtggcagccgggccgatccgcgtggtggtcgccaagccggggctcgacgggcacgatcgcggggccaaggtgatcgcgcgggcgttgcgtgacgcgggtatggaggtcatctacaccgggctgcaccagacgcccgagcaggtggtggacaccgcgatccaggaggacgccgacgcgatcggcctctccatcctctccggagcgcacaacacgctgttcgcgcgcgtgttggagctcttgaaggagcgggacgcggaggacatcaaggtgtttggtggcggcatcatcccggaggcggacatcgcgccgctgaaggagaagggcgtcgcggagatcttcacgcccggggccaccaccacgtcgatcgtggagtgggttcgggggaacgtgcgacaggccgtctgaggcattccccgtcgcccgtctgccgtggtcggcgtcatatcggcggacatcgtctcggtggacgtcatggcggcggggggagttcgtcgcgtatcgccgcgcggaggcgcagggtggtgaccaggcgctggaacgcttccgaccagtagctgcccgcgccgggtgacgcgtcctccgcttcgtcggggaccgcggtgagcgcttccaggcggaccgcctcggccgggtccagacagcgttccgccaggcccatcactccgctgaagctccatgggtaactgcccgcgtcgcgcgcgatgttcagggcgtccaccacggcccggccgagagggccggcccagggcaccgcgcagacgccgagcagttggaacgcctccgacaggccgtgtgccgctatgaaccccgccacccagtccgcgcgctcggcggcaggcatggaggcgagcagtttggcccgctcggcgagggacacggcgccaggccccgccgcgtcgggtgaggcgggggcgccgagcagcgctctggaccaggcgacgtcacgctggcgtacggccgcgcggcaccatgcggcgtgcagttcgccccgccagtcgtcggccaccgggagcgccacgatctccgccggggtgcggttgccgagccggggcggccaggtggcgagcggggccgattccacgagctggccgagccaccaggagcgctcgccccggccggtggggggcttcgggacgacgccgtcccgctccatgcccgcgtcgcactcgtgcggcgcctcgacggtgagggtcggcgtgctcgatgtgtggtcgac

SEQ ID NO: 137 - protein, 566 aa, Streptomyces coelicolor
MDAHAIEEGRLRWQARYDAARKRDADFTTLSGDPVEPVYGPRPGDEYEGFERIGWPGEYPFTRGLYPTGYRGRTWTIRQFAGFGNAEQTNERYKMILRNGGGGLSVAFDMPTLMGRDSDDPRSLGEVGHCGVAIDSAADMEVLFKDIPLGDVTTSMTISGPAVPVFCMYLVAAERQGVDASVLNGTLQTDIFKEYIAQKEWLFQPEPHLRLIGDLMEYCAAGIPAYKPLSVSGYHIREAGATAAQELAYTLADGFGYVELGLSRGLDVDVFAPGLSFFFDAHLDFFEEIAKFRAARRIWARWMRDVYGARTDKAQWLRFHTQTAGVSLTAQQPYNNVVRTAVEALAAVLGGTNSLHTNALDETLALPSEQAAEIALRTQQVLMEETGVANVADPLGGSWFIEQLTDRIEADAEKIFEQIKERGLRAHPDGQHPVGPITSGLLRGIEDGWFTGEIAESAFRYQQSLEKDDKKVVGVNVHTGSVTGDLEILRVSHEVEREQVRVLGERKDARDDAAVRGALDAMLAAARSGGNMIGPMLDAVRAEATLGEICGVLRDEWGVYTEPAGF

SEQ ID NO: 138 - DNA, 1701 bp, Streptomyces coelicolor
atggacgctcatgccatagaggagggccgccttcgctggcaggcccggtacgacgcggcgcgcaagcgcgacgcggacttcaccacgctctccggagaccccgtggagccggtgtacgggccccgccccggggacgagtacgagggcttcgagcggatcggctggccgggcgagtaccccttcacccgcggcctgtatccgaccgggtaccgggggcgtacgtggaccatccggcagttcgccgggttcggcaacgccgagcagaccaacgagcgctacaagatgatcctccgcaacggcggcggcgggctctcggtcgccttcgacatgccgaccctgatgggccgcgactccgacgacccgcgctcgctgggcgaggtcgggcactgcggggtggccatcgactcggccgccgacatggaagtgctgttcaaggacatcccgctcggggacgtgacgacctccatgacgatcagcgggcccgccgtgcccgtgttctgcatgtacctcgtcgccgccgagcgccagggcgtcgacgcatccgtgctcaacggcacgctgcagaccgacatcttcaaggagtacatcgcccagaaggagtggctcttccagcccgagccccacctccggctcatcggcgacctcatggagtactgcgcggccggcatccccgcctacaagccgctctccgtctccggctaccacatccgcgaggcgggcgcgacggccgcgcaggagctggcgtacacgctcgccgacggcttcggatacgtggagctgggcctcagccgcgggctcgacgtggacgtcttcgcgcccggcctctccttcttcttcgacgcgcacctcgacttcttcgaggagatcgccaagttccgcgcggcccgcaggatctgggcccgctggatgcgcgacgtgtacggcgcgcggaccgacaaggcccagtggctgcggttccacacccagaccgccggagtctcgctcaccgcgcagcagccgtacaacaacgtcgtacgcaccgcggtggaggcgctggcggccgtgctcggcggcaccaactccctgcacaccaacgcgctcgacgagaccctcgccctgcccagcgagcaggccgccgagatcgccctgcgcacccagcaggtgctgatggaggagaccggcgtcgccaacgtcgccgacccgctgggcggttcctggttcatcgagcagctgaccgaccgcatcgaggccgacgccgagaagatcttcgagcagatcaaggagcgggggctgcgcgcccaccccgacgggcagcaccccgtcggaccgatcacctccggcctgctgcgcggcatcgaggacggctggttcaccggcgagatcgccgagtccgccttccgctaccagcagtccttggagaaggacgacaagaaggtggtcggcgtcaacgtccacaccggctccgtcaccggcgacctggagatcctgcgggtcagccacgaggtcgagcgcgagcaggtgcgggtcctgggcgagcgcaaggacgcccgggacgacgccgccgtgcgcggcgccctggacgccatgctggccgcggcccgctccggcggcaacatgatcgggccgatgctggacgcggtgcgcgcggaggcgacgctgggcgagatctgcggtgtgctgcgcgacgagtggggggtgtacacggaaccggcggggttctga

SEQ ID NO: 139 - protein, 138 aa, Streptomyces coelicolor
MGVAAGPIRVVVAKPGLDGHDRGAKVIARALRDAGMEVIYTGLHQTPEQIVDTAIQEDADAIGLSILSGAHNTLFAAVIELLRERDAADILVFGGGIIPEADIAPLKEKGVAEIFTPGATTASIVDWVRANVREPAGA

SEQ ID NO: 140 - DNA, 417 bp, Streptomyces coelicolor
atgggtgtggcagccggtccgatccgcgtggtggtggccaagccggggctcgacggccacgatcgcggggccaaggtgatcgcgagggccctgcgtgacgccggtatggaggtgatctacaccgggctccaccagacgcccgagcagatcgtcgacaccgcgatccaggaggacgccgacgcgatcgggctgtccatcctctccggtgcgcacaacacgctcttcgccgccgtgatcgagctgctccgggagcgggacgccgcggacatcctggtcttcggcggcgggatcatccccgaggcggacatcgccccgctgaaggagaagggcgtcgcggagatcttcacgcccggcgccaccacggcgtccatcgtggactgggtccgggcgaacgtgcgggagcccgcgggagcatag

SEQ ID NO: 141 - protein, 566 aa, Streptomyces avermitilis
MDADAIEEGRRRWQARYDASRKREADFTTLSGDPVEPAYGPRPGDAYEGFERIGWPGEYPFTRGLYPTGYRGRTWTIRQFAGFGNAEQTNERYKKILANGGGGLSVAFDMPTLMGRDSDDRRALGEVGHCGVAIDSAADMEVLFKDIPLGDVTTSMTISGPAVPVFCMYLVAAERQGVDPSVLNGTLQTDIFKEYIAQKEWLFQPEPHLRLIGDLMEHCASKIPAYKPLSVSGYHIREAGATAAQELAYTLADGFGYVELGLSRGLDVDVFAPGLSFFFDAHVDFFEEIAKFRAARRIWARWLRDVYGAKSEKAQWLRFHTQTAGVSLTAQQPYNNVVRTAVEALAAVLGGTNSLHTNALDETLALPSEQAAEIALRTQQVLMEETGVANVADPLGGSWYVEQLTDRIEADAEKIFEQIRERGLRAHPDGRHPIGPITSGILRGIEDGWFTGEIAESAFQYQQALEKGDKRVVGVNVHHGSVTGDLEILRVSHEVEREQVRVLGERKSGRDDTAVTAALDAMLAAARDGSNMIAPMLDAVRAEATLGEICDVLREEWGVYTEPAGF

SEQ ID NO: 142 - DNA, 1701 bp, Streptomyces avermitilis
tcagaaaccggcgggctccgtgtagaccccccactcctcccggaggacatcgcagatctcgcccagcgtggcctccgcgcggaccgcgtccagcatcggggcgatcatgttcgacccgtcgcgcgcggcggcgagcatcgcgtccagggccgcggttacggccgtgtcgtcgcgccccgacttccgctcgcccagcacccgcacctgctcgcgctccacctcgtggctgacgcgcaggatctccaggtcgcccgtcacggacccgtggtggacgttgacgccgacgacccgcttgtcgcccttctccagcgcctgctggtactggaaggccgactcggcgatctccccggtgaaccagccgtcctcgatgccgcgcaggatgccggaggtgatgggcccgatcgggtgccgcccgtccgggtgggcccgcagcccgcgctccctgatctgttcgaagatcttctcggcgtcggcctcgatccggtcggtcagctgctccacgtaccaggaaccgcccagcggatcggccacgttggcgacgcccgtctcctccatcagcacctgctgggtgcgcagggcgatctcggccgcctgctcggacggcagggcgagggtctcgtcgagggcgttggtgtgcagcgagttcgtcccgccgagcaccgcggcgagggcctccacggccgtccgtacgacgttgttgtacggctgctgcgcggtgagcgagacgcccgcggtctgggtgtggaagcgcagccactgcgccttctccgacttcgccccgtacacgtcccgcagccagcgcgcccagatgcgccgcgccgcacggaacttggcgatctcctcgaagaagtcgacgtgcgcgtcgaagaagaaggagagcccgggcgcgaacacgtccacgtccaggccgcggctcagccccagctccacgtatccgaaaccgtcggcgagggtgtacgccagctcctgggcggccgtggcaccggcctcccggatgtggtacccggagacggacagcggcttgtacgcggggatcttcgaggcgcagtgctccatcaggtcgccgatgagccgcagatggggctcgggctggaagagccactccttctgcgcgatgtactccttgaagatgtcggtctggagggtgccgttgaggacggaggggtcgacgccctgccgctcggccgcgaccaggtacatgcagaagacgggcacggcgggcccgctgatcgtcatcgacgtcgtcacgtcacccagcgggatgtccttgaacaggacctccatgtcggccgccgagtcgatcgcgaccccgcagtgcccgacctcgccgagcgcgcggcggtcgtcggagtcgcgccccatgagcgtcggcatgtcgaaggccacggacagcccaccgccgccgttggcgaggatcttcttgtagcgctcgttggtctgctcggcgttgccgaacccggcgaactgccggatggtccaggtccggccccggtagccggtcggatacagaccgcgcgtgaaggggtactcacccggccagccgatccgctcgaaaccctcgtacgcgtccccgggccggggcccgtacgccggctccacgggatcgccggagagcgtggtgaaatcggcctcgcgcttgcgtgaggcgtcgtagcgggcctgccagcgtcggcggccttcctcgatggcgtcagcgtccat

SEQ ID NO: 143 - protein, 138 aa, Streptomyces avermitilis
MGVAAGPIRVVVAKPGLDGHDRGAKVIARALRDAGMEVIYTGLHQTPEQIVGTAIQEDADAIGLSILSGAHNTLFAAVIDLLKERDAEDIKVFGGGIIPEADIAPLKEKGVAEIFTPGATTASIVEWVRANVRQPAGA

SEQ ID NO: 144 - DNA, 1701 bp, Streptomyces avermitilis; identical to SEQ ID NO: 142

SEQ ID NO: 145 - protein, 139 aa, Saccharomyces cerevisiae
MSEITLGKYLFERLKQVNVNTVFGLPGDFNLSLLDKIYEVEGMRWAGNANELNAAYAADGYARIKGMSCIITTFGVGELSALNGIAGSYAEHVGVLHVVGVPSISAQAKQLLLHHTLGNGDFTVFHRMSANISETTAMI

SEQ ID NO: 146 - DNA, 1689 bp, Saccharomyces cerevisiae
atgtctgaaattactttgggtaaatatttgttcgaaagattaaagcaagtcaacgttaacaccgttttcggtttgccaggtgacttcaacttgtccttgttggacaagatctacgaagttgaaggtatgagatgggctggtaacgccaacgaattgaacgctgcttacgccgctgatggttacgctcgtatcaagggtatgtcttgtatcatcaccaccttcggtgtcggtgaattgtctgctttgaacggtattgccggttcttacgctgaacacgtcggtgttttgcacgttgttggtgtcccatccatctctgctcaagctaagcaattgttgttgcaccacaccttgggtaacggtgacttcactgttttccacagaatgtctgccaacatttctgaaaccactgctatgatcactgacattgctaccgccccagctgaaattgacagatgtatcagaaccacttacgtcacccaaagaccagtctacttaggtttgccagctaacttggtcgacttgaacgtcccagctaagttgttgcaaactccaattgacatgtctttgaagccaaacgatgctgaatccgaaaaggaagtcattgacaccatcttggctttggtcaaggatgctaagaacccagttatcttggctgatgcttgttgttccagacacgacgtcaaggctgaaactaagaagttgattgacttgactcaattcccagctttcgtcaccccaatgggtaagggttccattgacgaacaacacccaagatacggtggtgtttacgtcggtaccttgtccaagccagaagttaaggaagccgttgaatctgctgacttgattttgtctgtcggtgctttgttgtctgatttcaacaccggttctttctcttactcttacaagaccaagaacattgtcgaattccactccgaccacatgaagatcagaaacgccactttcccaggtgtccaaatgaaattcgttttgcaaaagttgttgaccactattgctgacgccgctaagggttacaagccagttgctgtcccagctagaactccagctaacgctgctgtcccagcttctaccccattgaagcaagaatggatgtggaaccaattgggtaacttcttgcaagaaggtgatgttgtcattgctgaaaccggtacctccgctttcggtatcaaccaaaccactttcccaaacaacacctacggtatctctcaagtcttatggggttccattggtttcaccactggtgctaccttgggtgctgctttcgctgctgaagaaattgatccaaagaagagagttatcttattcattggtgacggttctttgcaattgactgttcaagaaatctccaccatgatcagatggggcttgaagccatacttgttcgtcttgaacaacgatggttacaccattgaaaagttgattcacggtccaaaggctcaatacaacgaaattcaaggttgggaccacctatccttgttgccaactttcggtgctaaggactatgaaacccacagagtcgctaccaccggtgaatgggacaagttgacccaagacaagtctttcaacgacaactctaagatcagaatgattgaaatcatgttgccagtcttcgatgctccacaaaacttggttgaacaagctaagttgactgctgctaccaacgctaagcaa

SEQ ID NO: 147 - protein, 563 aa, Saccharomyces cerevisiae
MSEITLGKYLFERLSQVNCNTVFGLPGDFNLSLLDKLYEVKGMRWAGNANELNAAYAADGYARIKGMSCIITTFGVGELSALNGIAGSYAEHVGVLHVVGVPSISSQAKQLLLHHTLGNGDFTVFHRMSANISETTAMITDIANAPAEIDRCIRTTYTTQRPVYLGLPANLVDLNVPAKLLETPIDLSLKPNDAEAEAEVVRTVVELIKDAKNPVILADACASRHDVKAETKKLMDLTQFPVYVTPMGKGAIDEQHPRYGGVYVGTLSRPEVKKAVESADLILSIGALLSDFNTGSFSYSYKTKNIVEFHSDHIKIRNATFPGVQMKFALQKLLDAIPEVVKDYKPVAVPARVPITKSTPANTPMKQEWMWNHLGNFLREGDIVIAETGTSAFGINQTTFPTDVYAIVQVLWGSIGFTVGALLGATMAAEELDPKKRVILFIGDGSLQLTVQEISTMIRWGLKPYIFVLNNNGYTIEKLIHGPHAEYNEIQGWDHLALLPTFGARNYETHRVATTGEWEKLTQDKDFQDNSKIRMIEVMLPVFDAPQNLVKQAQLTAATNAKQ

SEQ ID NO: 148 - DNA, 1689 bp, Saccharomyces cerevisiae
atgtctgaaataaccttaggtaaatatttatttgaaagattgagccaagtcaactgtaacaccgtcttcggtttgccaggtgactttaacttgtctcttttggataagctttatgaagtcaaaggtatgagatgggctggtaacgctaacgaattgaacgctgcctatgctgctgatggttacgctcgtatcaagggtatgtcctgtattattaccaccttcggtgttggtgaattgtctgctttgaatggtattgccggttcttacgctgaacatgtcggtgttttgcacgttgttggtgttccatccatctcttctcaagctaagcaattgttgttgcatcataccttgggtaacggtgacttcactgttttccacagaatgtctgccaacatttctgaaaccactgccatgatcactgatattgctaacgctccagctgaaattgacagatgtatcagaaccacctacactacccaaagaccagtctacttgggtttgccagctaacttggttgacttgaacgtcccagccaagttattggaaactccaattgacttgtctttgaagccaaacgacgctgaagctgaagctgaagttgttagaactgttgttgaattgatcaaggatgctaagaacccagttatcttggctgatgcttgtgcttctagacatgatgtcaaggctgaaactaagaagttgatggacttgactcaattcccagtttacgtcaccccaatgggtaagggtgctattgacgaacaacacccaagatacggtggtgtttacgttggtaccttgtctagaccagaagttaagaaggctgtagaatctgctgatttgatattgtctatcggtgctttgttgtctgatttcaataccggttctttctcttactcctacaagaccaaaaatatcgttgaattccactctgaccacatcaagatcagaaacgccaccttcccaggtgttcaaatgaaatttgccttgcaaaaattgttggatgctattccagaagtcgtcaaggactacaaacctgttgctgtcccagctagagttccaattaccaagtctactccagctaacactccaatgaagcaagaatggatgtggaaccatttgggtaacttcttgagagaaggtgatattgttattgctgaaaccggtacttccgccttcggtattaaccaaactactttcccaacagatgtatacgctatcgtccaagtcttgtggggttccattggtttcacagtcggcgctctattgggtgctactatggccgctgaagaacttgatccaaagaagagagttattttattcattggtgacggttctctacaattgactgttcaagaaatctctaccatgattagatggggtttgaagccatacatttttgtcttgaataacaacggttacaccattgaaaaattgattcacggtcctcatgccgaatataatgaaattcaaggttgggaccacttggccttattgccaacttttggtgctagaaactacgaaacccacagagttgctaccactggtgaatgggaaaagttgactcaagacaaggacttccaagacaactctaagattagaatgattgaagttatgttgccagtctttgatgctccacaaaacttggttaaacaagctcaattgactgccgctactaacgctaaacaa

SEQ ID NO: 149 - protein, 533 aa, Saccharomyces cerevisiae
MSEITLGKYLFERLKQVNVNTIFGLPGDFNLSLLDKIYEVDGLRWAGNANELNAAYAADGYARIKGLSVLVTTFGVGELSALNGIAGSYAEHVGVLHVVGVPSISAQAKQLLLHHTLGNGDFTVFHRMSANISETTSMITDIATAPSEIDRLIRTTFITQRPSYLGLPANLVDLKVPGSLLEKPIDLSLKPNDPEAEKEVIDTVLELIQNSKNPVILSDACASRHNVKKETQKLIDLTQFPAFVTPLGKGSIDEQHPRYGGVYVGTLSKQDVKQAVESADLILSVGALLSDFNTGSFSYSYKTKNVVEFHSDYVKVKNATFLGVQMKFALQNLLKVIPDVVKGYKSVPVPTKTPANKGVPASTPLKQEWLWNELSKFLQEGDVIISETGTSAFGINQTIFPKDAYGISQVLWGSIGFTTGATLGAAFAAEEIDPNKRVILFIGDGSLQLTVQEISTMIRWGLKPYLFVLNNDGYTIEKLIHGPHAEYNEIQTWDHLALLPAFGAKKYENHKIATTGEWDALTTDSEFQKNSVI

SEQ ID NO: 150 - DNA, 1599 bp, Saccharomyces cerevisiae
atgtctgaaattactcttggaaaatacttatttgaaagattgaagcaagttaatgttaacaccatttttgggctaccaggcgacttcaacttgtccctattggacaagatttacgaggtagatggattgagatgggctggtaatgcaaatgagctgaacgccgcctatgccgccgatggttacgcacgcatcaagggtttatctgtgctggtaactacttttggcgtaggtgaattatccgccttgaatggtattgcaggatcgtatgcagaacacgtcggtgtactgcatgttgttggtgtcccctctatctccgctcaggctaagcaattgttgttgcatcataccttgggtaacggtgattttaccgtttttcacagaatgtccgccaatatctcagaaactacatcaatgattacagacattgctacagccccttcagaaatcgataggttgatcaggacaacatttataacacaaaggcctagctacttggggttgccagcgaatttggtagatctaaaggttcctggttctcttttggaaaaaccgattgatctatcattaaaacctaacgatcccgaagctgaaaaggaagttattgataccgtactagaattgatccagaattcgaaaaaccctgttatactatcggatgcctgtgcttctaggcacaacgttaaaaaagaaacccagaagttaattgatttgacgcaattcccagcttttgtgacacctctaggtaaagggtcaatagatgaacagcatcccagatatggcggtgtttatgtgggaacgctgtccaaacaagacgtgaaacaggccgttgagtcggctgatttgatcctttcggtcggtgctttgctctctgattttaacacaggttcgttttcctactcctacaagactaaaaatgtagtggagtttcattccgattacgtaaaggtgaagaacgctacgttcctcggtgtacaaatgaaatttgcactacaaaacttactgaaggttattcccgatgttgttaagggctacaagagcgttcccgtaccaaccaaaactcccgcaaacaaaggtgtacctgctagcacgcccttgaaacaagagtggttgtggaacgaattgtccaaattcttgcaagaaggtgatgttatcatttccgagaccggcacgtctgccttcggtatcaatcaaactatctttcctaaggacgcctacggtatctcgcaggtgttgtgggggtccatcggttttacaacaggagcaactttaggtgctgcctttgccgctgaggagattgaccccaacaagagagtcatcttattcataggtgacgggtctttgcagttaaccgtccaagaaatctccaccatgatcagatgggggttaaagccgtatctttttgtccttaacaacgacggctacactatcgaaaagctgattcatgggcctcacgcagagtacaacgaaatccagacctgggatcacctcgccctgttgcccgcatttggtgcgaaaaagtacgaaaatcacaagatcgccactacgggtgagtgggatgccttaaccactgattcagagttccagaaaaactcggtgatc

SEQ ID NO: 151 - protein, 564 aa, Candida glabrata
MSEITLGRYLFERLNQVDVKTIFGLPGDFNLSLLDKIYEVEGMRWAGNANELNAAYAADGYARIKGMSCIITTFGVGELSALNGIAGSYAEHVGVLHVVGVPSISSQAKQLLLHHTLGNGDFTVFHRMSANISETTAMVTDIATAPAEIDRCIRTTYITQRPVYLGLPANLVDLKVPAKLLETPIDLSLKPNDPEAETEVVDTVLELIKAAKNPVILADACASRHDVKAETKKLIDATQFPSFVTPMGKGSIDEQHPRFGGVYVGTLSRPEVKEAVESADLILSVGALLSDFNTGSFSYSYKTKNIVEFHSDYIKIRNATFPGVQMKFALQKLLNAVPEAIKGYKPVPVPARVPENKSCDPATPLKQEWMWNQVSKFLQEGDVVITETGTSAFGINQTPFPNNAYGISQVLWGSIGFTTGACLGAAFAAEEIDPKKRVILFIGDGSLQLTVQEISTMIRWGLKPYLFVLNNDGYTIERLIHGEKAGYNDIQNWDHLALLPTFGAKDYENHRVATTGEWDKLTQDKEFNKNSKIRMIEVMLPVMDAPTSLIEQAKLTASINAKQE

SEQ ID NO: 152 - DNA, 1692 bp, Candida glabrata
atgtctgagattactttgggtagatacttgttcgagagattgaaccaagtcgacgttaagaccatcttcggtttgccaggtgacttcaacttgtccctattggacaagatctacgaagttgaaggtatgagatgggctggtaacgctaacgaattgaacgctgcttacgctgctgacggttacgctagaatcaagggtatgtcctgtatcatcaccaccttcggtgtcggtgaattgtctgccttgaacggtattgccggttcttacgctgaacacgtcggtgtcttgcacgtcgtcggtgtcccatccatctcctctcaagctaagcaattgttgttgcaccacaccttgggtaacggtgacttcactgtcttccacagaatgtccgctaacatctctgagaccaccgctatggtcactgacatcgctaccgctccagctgagatcgacagatgtatcagaaccacctacatcacccaaagaccagtctacttgggtctaccagctaacttggtcgacctaaaggtcccagccaagcttttggaaaccccaattgacttgtccttgaagccaaacgacccagaagccgaaactgaagtcgttgacaccgtcttggaattgatcaaggctgctaagaacccagttatcttggctgatgcttgtgcttccagacacgacgtcaaggctgaaaccaagaagttgattgacgccactcaattcccatccttcgttaccccaatgggtaagggttccatcgacgaacaacacccaagattcggtggtgtctacgtcggtaccttgtccagaccagaagttaaggaagctgttgaatccgctgacttgatcttgtctgtcggtgctttgttgtccgatttcaacactggttctttctcttactcttacaagaccaagaacatcgtcgaattccactctgactacatcaagatcagaaacgctaccttcccaggtgtccaaatgaagttcgctttgcaaaagttgttgaacgccgtcccagaagctatcaagggttacaagccagtccctgtcccagctagagtcccagaaaacaagtcctgtgacccagctaccccattgaagcaagaatggatgtggaaccaagtttccaagttcttgcaagaaggtgatgttgttatcactgaaaccggtacctccgcttttggtatcaaccaaaccccattcccaaacaacgcttacggtatctcccaagttctatggggttccatcggtttcaccaccggtgcttgtttgggtgccgctttcgctgctgaagaaatcgacccaaagaagagagttatcttgttcattggtgacggttctttgcaattgactgtccaagaaatctccaccatgatcagatggggcttgaagccatacttgttcgtcttgaacaacgacggttacaccatcgaaagattgattcacggtgaaaaggctggttacaacgacatccaaaactgggaccacttggctctattgccaaccttcggtgctaaggactacgaaaaccacagagtcgccaccaccggtgaatgggacaagttgacccaagacaaggaattcaacaagaactccaagatcagaatgatcgaagttatgttgccagttatggacgctccaacttccttgattgaacaagctaagttgaccgcttccatcaacgctaagcaagaa

SEQ ID NO: 153 - protein, 596 aa, Pichia stipitis
MAEVSLGRYLFERLYQLQVQTIFGVPGDFNLSLLDKIYEVEDAHGKNSFRWAGNANELNASYAADGYSRVKRLGCLVTTFGVGELSALNGIAGSYAEHVGLLHVVGVPSISSQAKQLLLHHTLGNGDFTVFHRMSNNISQTTAFISDINSAPAEIDRCIREAYVKQRPVYIGLPANLVDLNVPASLLESPINLSLEKNDPEAQDEVIDSVLDLIKKSSNPIILVDACASRHDCKAEVTQLIEQTQFPVFVTPMGKGTVDEGGVDGELLEDDPHLIAKVAARLSAGKNAASRFGGVYVGTLSKPEVKDAVESADLILSVGALLSDFNTGSFSYSYRTKNIVEFHSDYTKIRQATFPGVQMKEALQELNKKVSSAASHYEVKPVPKIKLANTPATREVKLTQEWLWTRVSSWFREGDIIITETGTSSFGIVQSRFPNNTIGISQVLWGSIGFSVGATLGAAMAAQELDPNKRTILFVGDGSLQLTVQEISTIIRWGTTPYLFVLNNDGYTIERLIHGVNASYNDIQPWQNLEILPTFSAKNYDAVRISNIGEAEDILKDKEFGKNSKIRLIEVMLPRLDAPSNLAKQAAITAATNAEA

SEQ ID NO: 154 - DNA, 1788 bp, Pichia stipitis
atggctgaagtctcattaggaagatatctcttcgagagattgtaccaattgcaagtgcagaccatcttcggtgtccctggtgatttcaacttgtcgcttttggacaagatctacgaagtggaagatgcccatggcaagaattcgtttagatgggctggtaatgccaacgaattgaatgcatcgtacgctgctgacggttactcgagagtcaagcgtttagggtgtttggtcactacctttggtgtcggtgaattgtctgctttgaatggtattgccggttcttatgccgaacatgttggtttgcttcatgtcgtaggtgttccatcgatttcctcgcaagctaagcaattgttacttcaccacactttgggtaatggtgatttcactgttttccatagaatgtccaacaacatttctcagaccacagcctttatctccgatatcaactcggctccagctgaaattgatagatgtatcagagaggcctacgtcaaacaaagaccagtttatatcgggttaccagctaacttagttgatttgaatgttccggcctctttgcttgagtctccaatcaacttgtcgttggaaaagaacgacccagaggctcaagatgaagtcattgactctgtcttagacttgatcaaaaagtcgctgaacccaatcatcttggtcgatgcctgtgcctcgagacatgactgtaaggctgaagttactcagttgattgaacaaacccaattcccagtatttgtcactccaatgggtaaaggtaccgttgatgagggtggtgtagacggagaattgttagaagatgatcctcatttgattgccaaggtcgctgctaggttgtctgctggcaagaacgctgcctctagattcggaggtgtttatgtcggaaccttgtcgaagcccgaagtcaaggacgctgtagagagtgcagatttgattttgtctgtcggtgcccttttgtctgatttcaacactggttcattttcctactcctacagaaccaagaacatcgtcgaattccattctgattacactaagattagacaagccactttcccaggtgtgcagatgaaggaagccttgcaagaattgaacaagaaagtttcatctgctgctagtcactatgaagtcaagcctgtgcccaagatcaagttggccaatacaccagccaccagagaagtcaagttaactcaggaatggttgtggaccagagtgtcttcgtggttcagagaaggtgatattattatcaccgaaaccggtacatcctccttcggtatagttcaatccagattcccaaacaacaccatcggtatctcccaagtattgtggggttctattggtttctctgttggtgccactttgggtgctgccatggctgcccaagaactcgaccctaacaagagaaccatcttgtttgttggagatggttctttgcaattgaccgttcaggaaatctccaccataatcagatggggtaccacaccttaccttttcgtgttgaacaatgacggttacaccatcgagcgtttgatccacggtgtaaatgcctcatataatgacatccaaccatggcaaaacttggaaatcttgcctactttctcggccaagaactacgacgctgtgagaatctccaacatcggagaagcagaagatatcttgaaagacaaggaattcggaaagaactccaagattagattgatagaagtcatgttaccaagattggatgcaccatctaaccttgccaaacaagctgccattacagctgccaccaacgccgaagct

SEQ ID NO: 155 - protein, 569 aa, Pichia stipitis
MVSTYPESEVTLGRYLFERLHQLKVDTIFGLPGDFNLSLLDKVYEVPDMRWAGNANELNAAYAADGYSRIKGLSCLVTTFGVGELSALNGVGGAYAEHVGLLHVVGVPSISSQAKQLLLHHTLGNGDFTVFHRMSNSISQTTAFLSDISIAPGQIDRCIREAYVHQRPVYVGLPANMVDLKVPSSLLETPIDLKLKQNDPEAQEVVETVLKLVSQATNPIILVDACALRHNCKEEVKQLVDATNFQVFTTPMGKSGISESHPRLGGVYVGTMSSPQVKKAVENADLILSVGSLLSDFNTGSFSYSYKTKNVVEFHSDYMKIRQATFPGVQMKEALQQLIKRVSSYINPSYIPTRVPKRKQPLKAPSEAPLTQEYLWSKVSGWFREGDIIVTETGTSAFGIIQSHFPSNTIGISQVLWGSIGFTVGATVGAAMAAQEIDPSRRVILFVGDGSLQLTVQEISTLCKWDCNNTYLYVLNNDGYTIERLIHGKSASYNDIQPWNHLSLLRLFNAKKYQNVRVSTAGELDSLFSDKKFASPDRIRMIEVMLSRLDAPANLVAQAKLSERVNLEN

SEQ ID NO: 156 - DNA, 1707 bp, Pichia stipitis
atggtatcaacctacccagaatcagaggttactctaggaaggtacctctttgagcgactccaccaattgaaagtggacaccattttcggcttgccgggtgacttcaacctttccttattggacaaagtgtatgaagttccggatatgaggtgggctggaaatgccaacgaattgaatgctgcctatgctgccgatggttactccagaataaagggattgtcttgcttggtcacaacttttggtgttggtgaattgtctgctttaaacggagttggtggtgcctatgctgaacacgtaggacttctacatgtcgttggagttccatccatatcgtcacaggctaaacagttgttgctccaccataccttgggtaatggtgacttcactgtttttcacagaatgtccaatagcatttctcaaactacagcatttctctcagatatctctattgcaccaggtcaaatagatagatgcatcagagaagcatatgttcatcagagaccagtttatgttggtttaccggcaaatatggttgatctcaaggttccttctagtctcttagaaactccaattgatttgaaattgaaacaaaatgatcctgaagctcaagaagttgttgaaacagtcctgaagttggtgtcccaagctacaaaccccattatcttggtagacgcttgtgccctcagacacaattgcaaagaggaagtcaaacaattggttgatgccactaattttcaagtctttacaactccaatgggtaaatctggtatctccgaatctcatccaagattgggcggtgtctatgtcgggacaatgtcgagtcctcaagtcaaaaaagccgttgaaaatgccgatcttatactatctgttggttcgttgttatcggacttcaatacaggttcattttcatactcctacaagacgaagaatgttgttgaattccactctgactatatgaaaatcagacaggccaccttcccaggagttcaaatgaaagaagccttgcaacagttgataaaaagggtctcttcttacatcaatccaagctacattcctactcgagttcctaaaaggaaacagccattgaaagctccatcagaagctcctttgacccaagaatatttgtggtctaaagtatccggctggtttagagagggtgatattatcgtaaccgaaactggtacatctgctttcggaattattcaatcccattttcccagcaacactatcggtatatcccaagtcttgtggggctcaattggtttcacagtaggtgcaacagttggtgctgccatggcagcccaggaaatcgaccctagcaggagagtaattttgttcgtcggtgatggttcattgcagttgacggttcaggaaatctctacgttgtgtaaatgggattgtaacaatacttatctttacgtgttgaacaatgatggttacactatagaaaggttgatccacggcaaaagtgccagctacaacgatatacagccttggaaccatttatccttgcttcgcttattcaatgctaagaaataccaaaatgtcagagtatcgactgctggagaattggactctttgttctctgataagaaatttgcttctccagataggataagaatgattgaggtgatgttatcgagattggatgcaccagcaaatcttgttgctcaagcaaagttgtctgaacgggtaaaccttgaaaat

SEQ ID NO: 157 - protein, 563 aa, Kluyveromyces lactis
MSEITLGRYLFERLKQVEVQTIFGLPGDFNLSLLDNIYEVPGMRWAGNANELNAAYAADGYARLKGMSCIITTFGVGELSALNGIAGSYAEHVGVLHVVGVPSVSSQAKQLLLHHTLGNGDFTVFHRMSSNISETTAMITDINTAPAEIDRCIRTTYVSQRPVYLGLPANLVDLTVPASLLDTPIDLSLKPNDPEAEEEVIENVLQLIKEAKNPVILADACCSRHDAKAETKKLIDLTQFPAFVTPMGKGSIDEKHPRFGGVYVGTLSSPAVKEAVESADLVLSVGALLSDFNTGSFSYSYKTKNIVEFHSDYTKIRSATFPGVQMKFALQKLLTKVADAAKGYKPVPVPSEPEHNEAVADSTPLKQEWVWTQVGEFLREGDVVITETGTSAFGINQTHFPNNTYGISQVLWGSIGFTTGATLGAAFAAEEIDPKKRVILFIGDGSLQLTVQEISTMIRWGLKPYLFVLNNDGYTIERLIHGETAQYNCIQNWQHLELLPTFGAKDYEAVRVSTTGEWNKLTTDEKFQDNTRIRLIEVMLPTMDAPSNLVKQAQLTAATNAKN

SEQ ID NO: 158 - DNA, 1689 bp, Kluyveromyces lactis
atgtctgaaattacattaggtcgttacttgttcgaaagattaaagcaagtcgaagttcaaaccatctttggtctaccaggtgatttcaacttgtccctattggacaatatctacgaagtcccaggtatgagatgggctggtaatgccaacgaattgaacgctgcttacgctgctgatggttacgccagattaaagggtatgtcctgtatcatcaccaccttcggtgtcggtgaattgtctgctttgaacggtattgccggttcttacgctgaacacgttggtgtcttgcacgttgtcggtgttccatccgtctcttctcaagctaagcaattgttgttgcaccacaccttgggtaacggtgacttcactgttttccacagaatgtcctccaacatttctgaaaccactgctatgatcaccgatatcaacactgccccagctgaaatcgacagatgtatcagaaccacttacgtttcccaaagaccagtctacttgggtttgccagctaacttggtcgacttgactgtcccagcttctttgttggacactccaattgatttgagcttgaagccaaatgacccagaagccgaagaagaagtcatcgaaaacgtcttgcaactgatcaaggaagctaagaacccagttatcttggctgatgcttgttgttccagacacgatgccaaggctgagaccaagaagttgatcgacttgactcaattcccagccttcgttaccccaatgggtaagggttccattgacgaaaagcacccaagattcggtggtgtctacgtcggtaccctatcttctccagctgtcaaggaagccgttgaatctgctgacttggttctatcggtcggtgctctattgtccgatttcaacactggttctttctcttactcttacaagaccaagaacattgtcgaattccactctgactacaccaagatcagaagcgctaccttcccaggtgtccaaatgaagttcgctttacaaaaattgttgactaaggttgccgatgctgctaagggttacaagccagttccagttccatctgaaccagaacacaacgaagctgtcgctgactccactccattgaagcaagaatgggtctggactcaagtcggtgaattcttgagagaaggtgatgttgttatcactgaaaccggtacctctgccttcggtatcaaccaaactcatttcccaaacaacacatacggtatctctcaagttttatggggttccattggtttcaccactggtgctaccttgggtgctgccttcgctgccgaagaaattgatccaaagaagagagttatcttattcattggtgacggttctttgcaattgactgttcaagaaatctccaccatgatcagatggggcttgaagccatacttgttcgtattgaacaacgacggttacaccattgaaagattgattcacggtgaaaccgctcaatacaactgtatccaaaactggcaacacttggaattattgccaactttcggtgccaaggactacgaagctgtcagagtttccaccactggtgaatggaacaagttgaccactgacgaaaagttccaagacaacaccagaatcagattgatcgaagttatgttgccaactatggatgctccatctaacttggttaagcaagctcaattgactgctgctaccaacgctaagaac

SEQ ID NO: 159 - protein, 571 aa, Yarrowia lipolytica
MSDSEPQMVDLGDYLFARFKQLGVDSVFGVPGDFNLTLLDHVYNVDMRWVGNTNELNAGYSADGYSRVKRLACLVTTFGVGELSAVAAVAGSYAEHVGVVHVVGVPSTSAENKHLLLHHTLGNGDFRVFAQMSKLISEYTHHIEDPSEAADVIDTAIRIAYTHQRPVYIAVPSNFSEVDIADQARLDTPLDLSLQPNDPESQYEVIEEICSRIKAAKKPVILVDACASRYRCVDETKELAKITNFAYFVTPMGKGSVDEDTDRYGGTYVGSLTAPATAEVVETADLIISVGALLSDFNTGSFSYSYSTKNVVELHSDHVKIKSATYNNVGMKMLFPPLLEAVKKLVAETPDFASKALAVPDTTPKIPEVPDDHITTQAWLWQRLSYFLRPTDIVVTETGTSSFGIIQTKFPHNVRGISQVLWGSIGYSVGAACGASIAAQEIDPQQRVILFVGDGSLQLTVTEISCMIRNNVKPYIFVLNNDGYTIERLIHGENASYNDVHMWKYSKILDTFNAKAHESIVVNTKGEMDALFDNEEFAKPDKIRLIEVMCDKMDAPASLIKQAELSAKTNV

SEQ ID NO: 160 - DNA, 1713 bp, Yarrowia lipolytica
atgagcgactccgaaccccaaatggtcgacctgggcgactatctctttgcccgattcaagcagctaggcgtggactccgtctttggagtgcccggcgacttcaacctcaccctgttggaccacgtgtacaatgtcgacatgcggtgggttgggaacacaaacgagctgaatgccggctactcggccgacggctactcccgggtcaagcggctggcatgtcttgtcaccacctttggcgtgggagagctgtctgccgtggctgctgtggcaggctcgtacgccgagcatgtgggcgtggtgcatgttgtgggcgttcccagcacctctgctgagaacaagcatctgctgctgcaccacacactcggtaacggcgacttccgggtctttgcccagatgtccaaactcatctccgagtacacccaccatattgaggaccccagcgaggctgccgacgtaatcgacaccgccatccgaatcgcctacacccaccagcggcccgtttacattgctgtgccctccaacttctccgaggtcgatattgccgaccaggctagactggatacccccctggacctttcgctgcagcccaacgaccccgagagccagtacgaggtgattgaggagatttgctcgcgtatcaaggccgccaagaagcccgtgattctcgtcgacgcctgcgcttcgcgatacagatgtgtggacgagaccaaggagctggccaagatcaccaactttgcctactttgtcactcccatgggtaagggttctgtggacgaggatactgaccggtacggaggaacatacgtcggatcgctgactgctcctgctactgccgaggtggttgagacagctgatctcatcatctccgtaggagctcttctgtcggacttcaacaccggttccttctcgtactcctactccaccaaaaacgtggtggaattgcattcggaccacgtcaaaatcaagtccgccacctacaacaacgtcggcatgaaaatgctgttcccgcccctgctcgaagccgtcaagaaactggttgccgagacccctgactttgcatccaaggctctggctgttcccgacaccactcccaagatccccgaggtacccgatgatcacattacgacccaggcatggctgtggcagcgtctcagttactttctgaggcccaccgacatcgtggtcaccgagaccggaacctcgtcctttggaatcatccagaccaagttcccccacaacgtccgaggtatctcgcaggtgctgtggggctctattggatactcggtgggagcagcctgtggagcctccattgctgcacaggagattgacccccagcagcgagtgattctgtttgtgggcgacggctctcttcagctgacggtgaccgagatctcgtgcatgatccgcaacaacgtcaagccgtacatttttgtgctcaacaacgacggctacaccatcgagaggctcattcacggcgaaaacgcctcgtacaacgatgtgcacatgtggaagtactccaagattctcgacacgttcaacgccaaggcccacgagtcgattgtggtcaacaccaagggcgagatggacgctctgttcgacaacgaagagtttgccaagcccgacaagatccggctcattgaggtcatgtgcgacaagatggacgcgcctgcctcgttgatcaagcaggctgagctctctgccaagaccaacgtt

SEQ ID NO: 161 - protein, 571 aa, Schizosaccharomyces pombe
MSGDILVGEYLFKRLEQLGVKSILGVPGDFNLALLDLIEKVGDEKFRWVGNTNELNGAYAADGYARVNGLSAIVTTFGVGELSAINGVAGSYAEHVPVVHIVGMPSTKVQDTGALLHHTLGDGDFRTFMDMFKKVSAYSIMIDNGNDAAEKIDEALSICYKKARPVYIGIPSDAGYFKASSSNLGKRLKLEEDTNDPAVEQEVINHISEMVVNAKKPVILIDACAVRHRVVPEVHELIKLTHFPTYVTPMGKSAIDETSQFFDGVYVGSISDPEVKDRIESTDLLLSIGALKSDFNTGSFSYHLSQKNAVEFHSDHMRIRYALYPNVAMKYILRKLLKVLDASMCHSKAAPTIGYNIKPKHAEGYSSNEITHCWFWPKFSEFLKPRDVLITETGTANFGVLDCRFPKDVTAISQVLWGSIGYSVGAMFGAVLAVHDSKEPDRRTILVVGDGSLQLTITEISTCIRHNLKPIIFIINNDGYTIERLIHGLHASYNEINTKWGYQQIPKFFGAAENHFRTYCVKTPTDVEKLFSDKEFANADVIQVVELVMPMLDAPRVLVEQAKLTSKINKQ

SEQ ID NO: 162 - DNA, 1713 bp, Schizosaccharomyces pombe
atgagtggggatattttagtcggtgaatatctattcaaaaggcttgaacaattaggggtcaagtccattcttggtgttccaggagatttcaatttagctctacttgacttaattgagaaagttggagatgagaaatttcgttgggttggcaataccaatgagttgaatggtgcttatgccgctgatggttatgctcgtgttaatggtctttcagccattgttacaacgttcggcgtgggagagctttccgctattaatggagtggcaggttcttatgcggagcatgtcccagtagttcatattgttggaatgccttccacaaaggtgcaagatactggagctttgcttcatcatactttaggagatggagactttcgcactttcatggatatgtttaagaaagtttctgcctacagtataatgatcgataacggaaacgatgcagctgaaaagatcgatgaagccttgtcgatttgttataaaaaggctaggcctgtttacattggtattccttctgatgctggctacttcaaagcatcttcatcaaatcttgggaaaagactaaagctcgaggaggatactaacgatccagcagttgagcaagaagtcatcaatcatatctcggaaatggttgtcaatgcaaagaaaccagtgattttaattgacgcttgtgctgtaagacatcgtgtcgttccagaagtacatgagctgattaaattgacccatttccctacatatgtaactcccatgggtaaatctgcaattgacgaaacttcgcaattttttgacggcgtttatgttggttcaatttcagatcctgaagttaaagacagaattgaatccactgatctgttgctatccatcggtgctctcaaatcagactttaacacgggttccttctcttaccacctcagccaaaagaatgccgttgagtttcattcagaccacatgcgcattcgatatgctctttatccaaatgtagccatgaagtatattcttcgcaaactgttgaaagtacttgatgcttctatgtgtcattccaaggctgctcctaccattggctacaacatcaagcctaagcatgcggaaggatattcttccaacgagattactcattgctggttttggcctaaatttagtgaatttttgaagccccgagatgttttgatcaccgagactggaactgcaaactttggtgtccttgattgcaggtttccaaaggatgtaacagccatttcccaggtattatggggatctattggatactccgttggtgcaatgtttggtgctgttttggccgtccacgattctaaagagcccgatcgtcgtaccattcttgtagtaggtgatggatccttacaactgacgattacagagatttcaacctgcattcgccataacctcaaaccaattattttcataattaacaacgacggttacaccattgagcgtttaattcatggtttgcatgctagctataacgaaattaacactaaatggggctaccaacagattcccaagtttttcggagctgctgaaaaccacttccgcacttactgtgttaaaactcctactgacgttgaaaagttgtttagcgacaaggagtttgcaaatgcagatgtcattcaagtagttgagcttgtaatgcctatgttggatgcacctcgtgtcctagttgagcaagccaagttgacgtctaagatcaataagcaa

SEQ ID NO: 163 - protein, 563 aa, Zygosaccharomyces rouxii
MSEITLGRYLFERLKQVDTNTIFGVPGDFNLSLLDKVYEVQGLRWAGNANELNAAYAADGYARVKGLAALITTFGVGELSALNGIAGSYAEHVGVLHIVGVPSVSSQAKQLLLHHTLGNGDFTVFHRMSANISETTAMLTDITAAPAEIDRCIRVAYVNQRPVYLGLPANLVDQKVPASLLNTPIDLSLKENDPEAETEVVDTVLELIKEAKNPVILADACCSRHDVKAETKKLIDLTQFPSFVTPMGKGSIDEQNPRFGGVYVGTLSSPEVKEAVESADLVLSVGALLSDFNTGSFSYSYKTKNVVEFHSDHIKIRNATFPGVQMKFVLKKLLQAVPEAVKNYKPGPVPAPPSPNAEVADSTTLKQEWLWRQVGSFLREGDVVITETGTSAFGINQTHFPNQTYGISQVLWGSIGYTTGSTLGAAFAAEEIDPKKRVILFIGDGSLQLTVQEISTMIRWGLKPYLFVLNNDGYTIERLIHGETAEYNCIQPWKHLELLNTFGAKDYENHRVSTVGEWNKLTQDPKFNENSRIRMIEVMLEVMDAPSSLVAQAQLTAATNAKQ

SEQ ID NO: 164 - DNA, 1689 bp, Zygosaccharomyces rouxii
atgtctgaaattactctaggtcgttacttgttcgaaagattaaagcaagttgacactaacaccatcttcggtgttccaggtgacttcaacttgtccttgttggacaaggtctacgaagtgcaaggtctaagatgggctggtaacgctaacgaattgaacgctgcctacgctgctgacggttacgccagagttaagggtttggctgctttgatcaccaccttcggtgtcggtgaattgtctgctttgaacggtattgcaggttcttacgctgaacacgttggtgttttgcacattgttggtgttccatctgtctcttctcaagctaagcaattgttgttgcaccacaccttgggtaacggtgacttcactgttttccacagaatgtccgccaacatctctgaaaccaccgctatgttgaccgacatcactgctgctccagctgaaattgaccgttgcatcagagttgcttacgtcaaccaaagaccagtctacttgggtctaccagctaacttggttgaccaaaaggtcccagcttctttgttgaacactccaattgatctatctctaaaggagaacgacccagaagctgaaaccgaagttgttgacaccgttttggaattgatcaaggaagctaagaacccagttatcttggctgatgcttgctgctccagacacgacgtcaaggctgaaaccaagaagttgatcgacttgactcaattcccatctttcgttactcctatgggtaagggttccatcgacgaacaaaacccaagattcggtggtgtctacgtcggtactctatccagcccagaagttaaggaagctgttgaatctgctgacttggttctatctgtcggtgctctattgtccgatttcaacactggttctttctcttactcttacaagaccaagaacgttgttgaattccactctgaccacatcaagatcagaaacgctaccttcccaggtgttcaaatgaaattcgttttgaagaaactattgcaagctgtcccagaagctgtcaagaactacaagccaggtccagtcccagctccgccatctccaaacgctgaagttgctgactctaccaccttgaagcaagaatggttatggagacaagtcggtagcttcttgagagaaggtgatgttgttattaccgaaactggtacctctgctttcggtatcaaccaaactcacttccctaaccaaacttacggtatctctcaagtcttgtggggttctattggttacaccactggttccactttgggtgctgccttcgctgctgaagaaattgaccctaagaagagagttatcttgttcattggtgacggttctctacaattgaccgttcaagaaatctccaccatgatcagatggggtctaaagccatacttgttcgttttgaacaacgatggttacaccattgaaagattgattcacggtgaaaccgctgaatacaactgtatccaaccatggaagcacttggaattgttgaacaccttcggtgccaaggactacgaaaaccacagagtctccactgtcggtgaatggaacaagttgactcaagatccaaaattcaacgaaaactctagaattagaatgatcgaagttatgcttgaagtcatggacgctccatcttctttggtcgctcaagctcaattgaccgctgctactaacgctaagcaa

SEQ ID NO: 165 - protein, 267 aa, Saccharomyces cerevisiae
MSQGRKAAERLAKKTVLITGASAGIGKATALEYLEASNGDMKLILAARRLEKLEELKKTIDQEFPNAKVHVAQLDITQAEKIKPFIENLPQEFKDIDILVNNAGKALGSDRVGQIATEDIQDVFDTNVTALINITQAVLPIFQAKNSGDIVNLGSIAGRDAYPTGSIYCASKFAVGAFTDSLRKELINTKIRVILIAPGLVETEFSLVRYRGNEEQAKNVYKDTTPLMADDVADLIVYATSRKQNTVIADTLIFPTNQASPHHIFRG

SEQ ID NO: 166 - DNA, 804 bp, Saccharomyces cerevisiae
atgtcccaaggtagaaaagctgcagaaagattggctaagaagactgtcctcattacaggtgcatctgctggtattggtaaggcgaccgcattagagtacttggaggcatccaatggtgatatgaaactgatcttggctgctagaagattagaaaagctcgaggaattgaagaagaccattgatcaagagtttccaaacgcaaaagttcatgtggcccagctggatatcactcaagcagaaaaaatcaagcccttcattgaaaacttgccacaagagttcaaggatattgacattctggtgaacaatgccggaaaggctcttggcagtgaccgtgtgggccagatcgcaacggaggatatccaggacgtgtttgacaccaacgtcacggctttaatcaatatcacacaagctgtactgcccatattccaagccaagaattcaggagatattgtaaatttgggttcaatcgctggcagagacgcatacccaacaggttctatctattgtgcctctaagtttgccgtgggggcgttcactgatagtttgagaaaggagctcatcaacactaaaattagagtcattctaattgcaccagggctagtcgagactgaattttcactagttagatacagaggtaacgaggaacaagccaagaatgtttacaaggatactaccccattgatggctgatgacgtggctgatctgatcgtctatgcaacttccagaaaacaaaatactgtaattgcagacactttaatctttccaacaaaccaagcgtcacctcatcatatcttccgtggataa

SEQ ID NO: 167 - DNA, 33 bp, Artificial Sequence
  YAP1-F-XbaI-EcoRI primer
gttgtctagaattcccatgagtgtgtctaccgc

SEQ ID NO: 168 - DNA, 30 bp, Artificial Sequence
  YAP-R-XhoI primer
ccaggagctctcaagttcccgctttagttc

SEQ ID NO: 169 - DNA, 4898 bp, Artificial Sequence
  p416 TEF vector
tcgcgcgtttcggtgatgacggtgaaaacctctgacacatgcagctcccggagacggtcacagcttgtctgtaagcggatgccgggagcagacaagcccgtcagggcgcgtcagcgggtgttggcgggtgtcggggctggcttaactatgcggcatcagagcagattgtactgagagtgcaccataccacagcttttcaattcaattcatcattttttttttattcttttttttgatttcggtttctttgaaatttttttgattcggtaatctccgaacagaaggaagaacgaaggaaggagcacagacttagattggtatatatacgcatatgtagtgttgaagaaacatgaaattgcccagtattcttaacccaactgcacagaacaaaaacctgcaggaaacgaagataaatcatgtcgaaagctacatataaggaacgtgctgctactcatcctagtcctgttgctgccaagctatttaatatcatgcacgaaaagcaaacaaacttgtgtgcttcattggatgttcgtaccaccaaggaattactggagttagttgaagcattaggtcccaaaatttgtttactaaaaacacatgtggatatcttgactgatttttccatggagggcacagttaagccgctaaaggcattatccgccaagtacaattttttactcttcgaagacagaaaatttgctgacattggtaatacagtcaaattgcagtactctgcgggtgtatacagaatagcagaatgggcagacattacgaatgcacacggtgtggtgggcccaggtattgttagcggtttgaagcaggcggcagaagaagtaacaaaggaacctagaggccttttgatgttagcagaattgtcatgcaagggctccctatctactggagaatatactaagggtactgttgacattgcgaagagcgacaaagattttgttatcggctttattgctcaaagagacatgggtggaagagatgaaggttacgattggttgattatgacacccggtgtgggtttagatgacaagggagacgcattgggtcaacagtatagaaccgtggatgatgtggtctctacaggatctgacattattattgttggaagaggactatttgcaaagggaagggatgctaaggtagagggtgaacgttacagaaaagcaggctgggaagcatatttgagaagatgcggccagcaaaactaaaaaactgtattataagtaaatgcatgtatactaaactcacaaattagagcttcaatttaattatatcagttattaccctatgcggtgtgaaataccgcacagatgcgtaaggagaaaataccgcatcaggaaattgtaaacgttaatattttgttaaaattcgcgttaaatttttgttaaatcagctcattttttaaccaataggccgaaatcggcaaaatcccttataaatcaaaagaatagaccgagatagggttgagtgttgttccagtttggaacaagagtccactattaaagaacgtggactccaacgtcaaagggcgaaaaaccgtctatcagggcgatggcccactacgtgaaccatcaccctaatcaagttttttggggtcgaggtgccgtaaagcactaaatcggaaccctaaagggagcccccgatttagagcttgacggggaaagccggcgaacgtggcgagaaaggaagggaagaaagcgaaaggagcgggcgctagggcgctggcaagtgtagcggtcacgctgcgcgtaaccaccacacccgccgcgcttaatgcgccgctacagggcgcgtcgcgccattcgccattcaggctgcgcaactgttgggaagggcgatcggtgcgggcctcttcgctattacgccagctggcgaaagggggatgtgctgcaaggcgattaagttgggtaacgccagggttttcccagtcacgacgttgtaaaacgacggccagtgagcgcgcgtaatacgactcactatagggcgaattgggtaccgggccccccctcgaggtcgacggtatcgataagcttgatatcgaattcctgcagcccgggggatccactagttctagagcggccgccaccgcggtggagctccagcttttgttccctttagtgagggttaattgcgcgcttggcgtaatcatggtcatagctgtttcctgtgtgaaattgttatccgctcacaattccacacaacataggagccggaagcataaagtgtaaagcctggggtgcctaatgagtgaggtaactcacattaattgcgttgcgctcactgcccgctttccagtcgggaaacctgtcgtgccagctgcattaatgaatcggccaacgcgcggggagaggcggtttgcgtattgggcgctcttccgcttcctcgctcactgactcgctgcgctcggtcgttcggctgcggcgagcggtatcagctcactcaaaggcggtaatacggttatccacagaatcaggggataacgcaggaaagaacatgtgagcaaaaggccagcaaaaggccaggaaccgtaaaaaggccgcgttgctggcgtttttccataggctccgcccccctgacgagcatcacaaaaatcgacgctcaagtcagaggtggcgaaacccgacaggactataaagataccaggcgtttccccctggaagctccctcgtgcgctctcctgttccgaccctgccgcttaccggatacctgtccgcctttctcccttcgggaagcgtggcgctttctcatagctcacgctgtaggtatctcagttcggtgtaggtcgttcgctccaagctgggctgtgtgcacgaaccccccgttcagcccgaccgctgcgccttatccggtaactatcgtcttgagtccaacccggtaagacacgacttatcgccactggcagcagccactggtaacaggattagcagagcgaggtatgtaggcggtgctacagagttcttgaagtggtggcctaactacggctacactagaaggacagtatttggtatctgcgctctgctgaagccagttaccttcggaaaaagagttggtagctcttgatccggcaaacaaaccaccgctggtagcggtggtttttttgtttgcaagcagcagattacgcgcagaaaaaaaggatctcaagaagatcctttgatcttttctacggggtctgacgctcagtggaacgaaaactcacgttaagggattttggtcatgagattatcaaaaaggatcttcacctagatccttttaaattaaaaatgaagttttaaatcaatctaaagtatatatgagtaaacttggtctgacagttaccaatgcttaatcagtgaggcacctatctcagcgatctgtctatttcgttcatccatagttgcctgactccccgtcgtgtagataactacgatacgggagggcttaccatctggccccagtgctgcaatgataccgcgagacccacgctcaccggctccagatttatcagcaataaaccagccagccggaagggccgagcgcagaagtggtcctgcaactttatccgcctccatccagtctattaattgttgccgggaagctagagtaagtagttcgccagttaatagtttgcgcaacgttgttgccattgctacaggcatcgtggtgtcacgctcgtcgtttggtatggcttcattcagctccggttcccaacgatcaaggcgagttacatgatcccccatgttgtgcaaaaaagcggttagctccttcggtcctccgatcgttgtcagaagtaagttggccgcagtgttatcactcatggttatggcagcactgcataattctcttactgtcatgccatccgtaagatgcttttctgtgactggtgagtactcaaccaagtcattctgagaatagtgtatgcggcgaccgagttgctcttgcccggcgtcaatacgggataataccgcgccacatagcagaactttaaaagtgctcatcattggaaaacgttcttcggggcgaaaactctcaaggatcttaccgctgttgagatccagttcgatgtaacccactcgtgcacccaactgatcttcagcatcttttactttcaccagcgtttctgggtgagcaaaaacaggaaggcaaaatgccgcaaaaaagggaataagggcgacacggaaatgttgaatactcatactcttcctttttcaatattattgaagcatttatcagggttattgtctcatgagcggatacatatttgaatgtatttagaaaaataaacaaataggggttccgcgcacatttccccgaaaagtgccacctgggtccttttcatcacgtgctataaaaataattataatttaaattttttaatataaatatataaattaaaaatagaaagtaaaaaaagaaattaaagaaaaaatagtttttgttttccgaagatgtaaaagactctagggggatcgccaacaaatactaccttttatcttgctcttcctgctctcaggtattaatgccgaattgtttcatcttgtctgtgtagaagaccacacacgaaaatcctgtgattttacattttacttatcgttaatcgaatgtatatctatttaatctgcttttcttgtctaataaatatatatgtaaagtacgctttttgttgaaattttttaaacctttgtttatttttttttcttcattccgtaactcttctaccttctttatttactttctaaaatccaaatacaaaacataaaaataaataaacacagagtaaattcccaaattattccatcattaaaagatacgaggcgcgtgtaagttacaggcaagcgatccgtcctaagaaaccattattatcatgacattaacctataaaaataggcgtatcacgaggccctttcgtc

SEQ ID NO: 170 - DNA, 23 bp, Artificial Sequence
  p416 Forward  primer
gctcattagaaagaaagcatagc

SEQ ID NO: 171 - DNA, 25 bp, Artificial Sequence
  p416 Reverse primer
gacttcaggttgtctaactccttcc

SEQ ID NO: 172 - DNA, 20 bp, Artificial Sequence
  YAP1306F primer
tcagcagcaaaatgaagtgg

SEQ ID NO: 173 - DNA, 20 bp, Artificial Sequence
  YAP1769R primer
accaatccatcgaagtggag

SEQ ID NO: 174 - DNA, 20 bp, Artificial Sequence
  YAP1961F primer
cccatctcggctcttgataa

SEQ ID NO: 175 - DNA, 20 bp, Artificial Sequence
  YAP11368R primer
cagtaggctgggattggtgt

SEQ ID NO: 176 - DNA, 20 bp, Artificial Sequence
  YAP1488R primer
aattggctcgctattgctgt

SEQ ID NO: 177 - DNA, 20 bp, Artificial Sequence
  YAP11647R primer
ttgtttcggaagctctggtt

SEQ ID NO: 178 - DNA, 1953 bp, Artificial Sequence
  D8-1 variant
atgagtgtgtctaccgccaagaggtcgctggatgtcgtttctccgggttcattagcggagtttgagggttcaaaatctcgtcacgatgaaatagaaaatgaacatagacgtactggtacacgtgatggcgaggatagcgagcaaccgaagaagaagggtagcaaaactagcaaaaagcaagatttggatcctgaaactaagcagaagaggactgcccaaaatcgggccgctcaaagagcttttagggaacgtaaggagaggaagatgaaggaattggagaagaaggtacaaagtttagagagtattcagcagcaaaatgaagtggaagctacttttttgagggaccagttaatcactctggtgaatgagttaaaaaaatatagaccagagacaagaaatgactcaaaagtgctggaatatttagcaaggcgagatcctaatttgcatttttcaaaaaataacgttaaccacagcaatagcgagccaattgacacacccaatgatgacatacaagaaaatgttaaacaaaagatgaatttcacgtttcaatatccgcttgataacgacaacgacaacgacaacagtaaaaatgtggggaaacaattaccttcaccaaatgatccaagtcattcggctcctatgcctataaatcagacacaaaagaaattaagtgacgctacagattcctccagcgctactttggattccctttcaaatagtaacgatgttcttaataacacaccaaactcctccacttcgatggattggttagataatgtaatatatactaacaggtttgtgtcaggtgatgatggcagcaatagtaaaactaagaatttagacagtaatatgttttctaatgactttaattttgaaaaccaatttgatgaacaagtttcggagttttgttcgaaaatgaaccaggtatgtggaacaaggcaatgtcccattcccaagaaacccatctcggctcttgataaagaagttttcgcgtcatcttctatactaagttcaaattctcctgctttaacaaatacttgggaatcacattctaatattacagataatactcctgctaatgtcattgctactgatgctactaaatatgaaaattccttctccggttttggccgacttggtttcgatatgagtgccaatcattacgtcgtgaatgataatagcactggtagcactgatagcactggtagcactggcaataagaacaaaaagaacaataataatagcgatgatgtactcccattcatatccgagtcaccgtttgatatgaaccaagttactaatttttttagtccgggatctaccggcatcggcaataatgctgcctctaacaccaatcccagcctactgcaaagcagcaaagaggatataccttttatcaacgcaaatctggctttcccagacgacaattcaactaatattcaattacaacctttctctgaatctcaatctcaaaataagtttgactacgacatgttttttagagattcatcgaaggaaggtaacaatttatttggagagtttttagaggatgacgatgatgacaaaaaagccgctaatatgtcagacgatgagtcaagtttaatcaagaaccagttaattaacgaagaaccagagcttccgaaacaatatctacaatcggtaccaggaaatgaaagcgaaatctcacaaaaaaatggcagtagtttgcagaatgctgacaaaatcaataatggcaatgataacgataatgataatgatgtcgttccatctaaggaaggctctttactaaggtgttcggaaatttgggatagaataacaacacatccgaaatactcagatattgatgtcgatggtttatgttccgagctaatggcaaaggcaaaatgttcagaaagaggggttgtcatcaatgcagaagacgttcaattagctttgaataagcatatgaactaa

SEQ ID NO: 179 - DNA, 4582 bp, Artificial Sequence
  pLA54 plasmid
gggtaccgagctcgaattcactggccgtcgttttacaacgtcgtgactgggaaaaccctggcgttacccaacttaatcgccttgcagcacatccccctttcgccagctggcgtaatagcgaagaggcccgcaccgatcgcccttcccaacagttgcgcagcctgaatggcgaatggcgcctgatgcggtattttctccttacgcatctgtgcggtatttcacaccgcatatggtgcactctcagtacaatctgctctgatgccgcatagttaagccagccccgacacccgccaacacccgctgacgcgccctgacgggcttgtctgctcccggcatccgcttacagacaagctgtgaccgtctccgggagctgcatgtgtcagaggttttcaccgtcatcaccgaaacgcgcgagacgaaagggcctcgtgatacgcctatttttataggttaatgtcatgataataatggtttcttagacgtcaggtggcacttttcggggaaatgtgcgcggaacccctatttgtttatttttctaaatacattcaaatatgtatccgctcatgagacaataaccctgataaatgcttcaataatattgaaaaaggaagagtatgagtattcaacatttccgtgtcgcccttattcccttttttgcggcattttgccttcctgtttttgctcacccagaaacgctggtgaaagtaaaagatgctgaagatcagttgggtgcacgagtgggttacatcgaactggatctcaacagcggtaagatccttgagagttttcgccccgaagaacgttttccaatgatgagcacttttaaagttctgctatgtggcgcggtattatcccgtattgacgccgggcaagagcaactcggtcgccgcatacactattctcagaatgacttggttgagtactcaccagtcacagaaaagcatcttacggatggcatgacagtaagagaattatgcagtgctgccataaccatgagtgataacactgcggccaacttacttctgacaacgatcggaggaccgaaggagctaaccgcttttttgcacaacatgggggatcatgtaactcgccttgatcgttgggaaccggagctgaatgagccataccaaacgacgagcgtgacaccacgatgcctgtagcaatggcaacaacgttgcgcaaactattactggcgaactacttactctagcttcccggcaacaattaatagactggatggaggcggataaagttgcaggaccacttctgcgctcggcccttccggctggctggtttattgctgataaatctggagccggtgagcgtggtctcgcggtatcattgcagcactggggccagatggtaagccctcccgtatcgtagttatctacacgacgggagtcaggcaactatggatgaacgaaatagacagatcgctgagataggtgcctcactgattaagcattggtaactgtcagaccaagtttactcatatatactttagattgatttaaaacttcatttttaatttaaaaggatctaggtgaagatcctttttgataatctcatgaccaaaatcccttaacgtgagttttcgttccactgagcgtcagaccccgtagaaaagatcaaaggatcttcttgagatcctttttttctgcgcgtaatctgctgcttgcaaacaaaaaaaccaccgctaccagcggtggtttgtttgccggatcaagagctaccaactctttttccgaaggtaactggcttcagcagagcgcagataccaaatactgtccttctagtgtagccgtagttaggccaccacttcaagaactctgtagcaccgcctacatacctcgctctgctaatcctgttaccagtggctgctgccagtggcgataagtcgtgtcttaccgggttggactcaagacgatagttaccggataaggcgcagcggtcgggctgaacggggggttcgtgcacacagcccagcttggagcgaacgacctacaccgaactgagatacctacagcgtgagctatgagaaagcgccacgcttcccgaagggagaaaggcggacaggtatccggtaagcggcagggtcggaacaggagagcgcacgagggagcttccagggggaaacgcctggtatctttatagtcctgtcgggtttcgccacctctgacttgagcgtcgatttttgtgatgctcgtcaggggggcggagcctatggaaaaacgccagcaacgcggcctttttacggttcctggccttttgctggccttttgctcacatgttctttcctgcgttatcccctgattctgtggataaccgtattaccgcctttgagtgagctgataccgctcgccgcagccgaacgaccgagcgcagcgagtcagtgagcgaggaagcggaagagcgcccaatacgcaaaccgcctctccccgcgcgttggccgattcattaatgcagctggcacgacaggtttcccgactggaaagcgggcagtgagcgcaacgcaattaatgtgagttagctcactcattaggcaccccaggctttacactttatgcttccggctcgtatgttgtgtggaattgtgagcggataacaatttcacacaggaaacagctatgaccatgattacgccaagcttgcatgcctgcaggtcgactctagaggatccccgcattgcggattacgtattctaatgttcagataacttcgtatagcatacattatacgaagttatctagggattcataaccattttctcaatcgaattacacagaacacaccgtacaaacctctctatcataactacttaatagtcacacacgtactcgtctaaatacacatcatcgtcctacaagttcatcaaagtgttggacagacaactataccagcatggatctcttgtatcggttcttttctcccgctctctcgcaataacaatgaacactgggtcaatcatagcctacacaggtgaacagagtagcgtttatacagggtttatacggtgattcctacggcaaaaatttttcatttctaaaaaaaaaaagaaaaatttttctttccaacgctagaaggaaaagaaaaatctaattaaattgatttggtgattttctgagagttccctttttcatatatcgaattttgaatataaaaggagatcgaaaaaatttttctattcaatctgttttctggttttatttgatagtttttttgtgtattattattatggattagtactggtttatatgggtttttctgtataacttctttttattttagtttgtttaatcttattttgagttacattatagttccctaactgcaagagaagtaacattaaaactcgagatgggtaaggaaaagactcacgtttcgaggccgcgattaaattccaacatggatgctgatttatatgggtataaatgggctcgcgataatgtcgggcaatcaggtgcgacaatctatcgattgtatgggaagcccgatgcgccagagttgtttctgaaacatggcaaaggtagcgttgccaatgatgttacagatgagatggtcagactaaactggctgacggaatttatgcctcttccgaccatcaagcattttatccgtactcctgatgatgcatggttactcaccactgcgatccccggcaaaacagcattccaggtattagaagaatatcctgattcaggtgaaaatattgttgatgcgctggcagtgttcctgcgccggttgcattcgattcctgtttgtaattgtccttttaacagcgatcgcgtatttcgtctcgctcaggcgcaatcacgaatgaataacggtttggttgatgcgagtgattttgatgacgagcgtaatggctggcctgttgaacaagtctggaaagaaatgcataagcttttgccattctcaccggattcagtcgtcactcatggtgatttctcacttgataaccttatttttgacgaggggaaattaataggttgtattgatgttggacgagtcggaatcgcagaccgataccaggatcttgccatcctatggaactgcctcggtgagttttctccttcattacagaaacggctttttcaaaaatatggtattgataatcctgatatgaataaattgcagtttcatttgatgctcgatgagtttttctaagtttaacttgatactactagattttttctcttcatttataaaatttttggttataattgaagctttagaagtatgaaaaaatccttttttttcattctttgcaaccaaaataagaagcttcttttattcattgaaatgatgaatataaacctaacaaaagaaaaagactcgaatatcaaacattaaaaaaaaataaaagaggttatctgttttcccatttagttggagtttgcattttctaatagatagaactctcaattaatgtggatttagtttctctgttcgtttttttttgttttgttctcactgtatttacatttctatttagtatttagttattcatataatctataacttcgtatagcatacattatacgaagttatccagtgatgatacaacgagttagccaaggtg

SEQ ID NO: 180 - DNA, 80 bp, Artificial Sequence
  BK505 primer
ttccggtttctttgaaatttttttgattcggtaatctccgagcagaaggagcattgcggattacgtattctaatgttcag

SEQ ID NO: 181 - DNA, 81 bp, Artificial Sequence
  BK506 primer
gggtaataactgatataattaaattgaagctctaatttgtgagtttagtacaccttggctaactcgttgtatcatcactgg

SEQ ID NO: 182 - DNA, 38 bp, Artificial Sequence
  LA468 primer
gcctcgagttttaatgttacttctcttgcagttaggga

SEQ ID NO: 183 - DNA, 31 bp, Artificial Sequence
  LA492 primer
gctaaattcgagtgaaacacaggaagaccag

SEQ ID NO: 184 - DNA, 4236 bp, Artificial Sequence
  pLA33 plasmid
aaacgccagcaacgcggcctttttacggttcctggccttttgctggccttttgctcacatgttctttcctgcgttatcccctgattctgtggataaccgtattaccgcctttgagtgagctgataccgctcgccgcagccgaacgaccgagcgcagcgagtcagtgagcgaggaagcggaagagcgcccaatacgcaaaccgcctctccccgcgcgttggccgattcattaatgcagctggcacgacaggtttcccgactggaaagcgggcagtgagcgcaacgcaattaatgtgagttagctcactcattaggcaccccaggctttacactttatgcttccggctcgtatgttgtgtggaattgtgagcggataacaatttcacacaggaaacagctatgaccatgattacgccaagcttgcatgcctgcaggtcgactctagaggatccgcattgcggattacgtattctaatgttcagataacttcgtatagcatacattatacgaagttatgcagattgtactgagagtgcaccataccacagcttttcaattcaattcatcattttttttttattcttttttttgatttcggtttctttgaaatttttttgattcggtaatctccgaacagaaggaagaacgaaggaaggagcacagacttagattggtatatatacgcatatgtagtgttgaagaaacatgaaattgcccagtattcttaacccaactgcacagaacaaaaacctgcaggaaacgaagataaatcatgtcgaaagctacatataaggaacgtgctgctactcatcctagtcctgttgctgccaagctatttaatatcatgcacgaaaagcaaacaaacttgtgtgcttcattggatgttcgtaccaccaaggaattactggagttagttgaagcattaggtcccaaaatttgtttactaaaaacacatgtggatatcttgactgatttttccatggagggcacagttaagccgctaaaggcattatccgccaagtacaattttttactcttcgaagacagaaaatttgctgacattggtaatacagtcaaattgcagtactctgcgggtgtatacagaatagcagaatgggcagacattacgaatgcacacggtgtggtgggcccaggtattgttagcggtttgaagcaggcggcagaagaagtaacaaaggaacctagaggccttttgatgttagcagaattgtcatgcaagggctccctatctactggagaatatactaagggtactgttgacattgcgaagagcgacaaagattttgttatcggctttattgctcaaagagacatgggtggaagagatgaaggttacgattggttgattatgacacccggtgtgggtttagatgacaagggagacgcattgggtcaacagtatagaaccgtggatgatgtggtctctacaggatctgacattattattgttggaagaggactatttgcaaagggaagggatgctaaggtagagggtgaacgttacagaaaagcaggctgggaagcatatttgagaagatgcggccagcaaaactaaaaaactgtattataagtaaatgcatgtatactaaactcacaaattagagcttcaatttaattatatcagttattaccctatgcggtgtgaaataccgcacagatgcgtaaggagaaaataccgcatcaggaaattgtaaacgttaatattttgttaaaattcgcgttaaatttttgttaaatcagctcattttttaaccaataggccgaaatcggcaaaatcccttataaatcaaaagaatagaccgagatagggttgagtgttgttccagtttggaacaagagtccactattaaagaacgtggactccaacgtcaaagggcgaaaaaccgtctatcagggcgatggcccactacgtgaaccatcaccctaatcaagataacttcgtatagcatacattatacgaagttatccagtgatgatacaacgagttagccaaggtgaattcactggccgtcgttttacaacgtcgtgactgggaaaaccctggcgttacccaacttaatcgccttgcagcacatccccctttcgccagctggcgtaatagcgaagaggcccgcaccgatcgcccttcccaacagttgcgcagcctgaatggcgaatggcgcctgatgcggtattttctccttacgcatctgtgcggtatttcacaccgcatatggtgcactctcagtacaatctgctctgatgccgcatagttaagccagccccgacacccgccaacacccgctgacgcgccctgacgggcttgtctgctcccggcatccgcttacagacaagctgtgaccgtctccgggagctgcatgtgtcagaggttttcaccgtcatcaccgaaacgcgcgagacgaaagggcctcgtgatacgcctatttttataggttaatgtcatgataataatggtttcttagacgtcaggtggcacttttcggggaaatgtgcgcggaacccctatttgtttatttttctaaatacattcaaatatgtatccgctcatgagacaataaccctgataaatgcttcaataatattgaaaaaggaagagtatgagtattcaacatttccgtgtcgcccttattcccttttttgcggcattttgccttcctgtttttgctcacccagaaacgctggtgaaagtaaaagatgctgaagatcagttgggtgcacgagtgggttacatcgaactggatctcaacagcggtaagatccttgagagttttcgccccgaagaacgttttccaatgatgagcacttttaaagttctgctatgtggcgcggtattatcccgtattgacgccgggcaagagcaactcggtcgccgcatacactattctcagaatgacttggttgagtactcaccagtcacagaaaagcatcttacggatggcatgacagtaagagaattatgcagtgctgccataaccatgagtgataacactgcggccaacttacttctgacaacgatcggaggaccgaaggagctaaccgcttttttgcacaacatgggggatcatgtaactcgccttgatcgttgggaaccggagctgaatgaagccataccaaacgacgagcgtgacaccacgatgcctgtagcaatggcaacaacgttgcgcaaactattaactggcgaactacttactctagcttcccggcaacaattaatagactggatggaggcggataaagttgcaggaccacttctgcgctcggcccttccggctggctggtttattgctgataaatctggagccggtgagcgtgggtctcgcggtatcattgcagcactggggccagatggtaagccctcccgtatcgtagttatctacacgacggggagtcaggcaactatggatgaacgaaatagacagatcgctgagataggtgcctcactgattaagcattggtaactgtcagaccaagtttactcatatatactttagattgatttaaaacttcatttttaatttaaaaggatctaggtgaagatcctttttgataatctcatgaccaaaatcccttaacgtgagttttcgttccactgagcgtcagaccccgtagaaaagatcaaaggatcttcttgagatcctttttttctgcgcgtaatctgctgcttgcaaacaaaaaaaccaccgctaccagcggtggtttgtttgccggatcaagagctaccaactctttttccgaaggtaactggcttcagcagagcgcagataccaaatactgtccttctagtgtagccgtagttaggccaccacttcaagaactctgtagcaccgcctacatacctcgctctgctaatcctgttaccagtggctgctgccagtggcgataagtcgtgtcttaccgggttggactcaagacgatagttaccggataaggcgcagcggtcgggctgaacggggggttcgtgcacacagcccagcttggagcgaacgacctacaccgaactgagatacctacagcgtgagctatgagaaagcgccacgcttcccgaagggagaaaggcggacaggtatccggtaagcggcagggtcggaacaggagagcgcacgagggagcttccagggggaaacgcctggtatctttatagtcctgtcgggtttcgccacctctgacttgagcgtcgatttttgtgatgctcgtcaggggggcggagcctatggaa

SEQ ID NO: 185 - DNA, 80 bp, Artificial Sequence
  Primer 315
cttcgaagaatatactaaaaaatgagcaggcaagataaacgaaggcaaaggcattgcggattacgtattctaatgttcag

SEQ ID NO: 186 - DNA, 81 bp, Artificial Sequence
  Primer 316
tatacacatgtatatatatcgtatgctgcagctttaaataatcggtgtcacaccttggctaactcgttgtatcatcactgg

SEQ ID NO: 187 - DNA, 22 bp, Artificial Sequence
  Primer 92
gagaagatgcggccagcaaaac

SEQ ID NO: 188 - DNA, 25 bp, Artificial Sequence
  Primer 346
ggaataccacttgccacctatcacc

SEQ ID NO: 189 - DNA, 7555 bp, Artificial Sequence
  pRS423::GAL1p-cre plasmid
tcgcgcgtttcggtgatgacggtgaaaacctctgacacatgcagctcccggagacggtcacagcttgtctgtaagcggatgccgggagcagacaagcccgtcagggcgcgtcagcgggtgttggcgggtgtcggggctggcttaactatgcggcatcagagcagattgtactgagagtgcaccataaattcccgttttaagagcttggtgagcgctaggagtcactgccaggtatcgtttgaacacggcattagtcagggaagtcataacacagtcctttcccgcaattttctttttctattactcttggcctcctctagtacactctatatttttttatgcctcggtaatgattttcatttttttttttcccctagcggatgactctttttttttcttagcgattggcattatcacataatgaattatacattatataaagtaatgtgatttcttcgaagaatatactaaaaaatgagcaggcaagataaacgaaggcaaagatgacagagcagaaagccctagtaaagcgtattacaaatgaaaccaagattcagattgcgatctctttaaagggtggtcccctagcgatagagcactcgatcttcccagaaaaagaggcagaagcagtagcagaacaggccacacaatcgcaagtgattaacgtccacacaggtatagggtttctggaccatatgatacatgctctggccaagcattccggctggtcgctaatcgttgagtgcattggtgacttacacatagacgaccatcacaccactgaagactgcgggattgctctcggtcaagcttttaaagaggccctactggcgcgtggagtaaaaaggtttggatcaggatttgcgcctttggatgaggcactttccagagcggtggtagatctttcgaacaggccgtacgcagttgtcgaacttggtttgcaaagggagaaagtaggagatctctcttgcgagatgatcccgcattttcttgaaagctttgcagaggctagcagaattaccctccacgttgattgtctgcgaggcaagaatgatcatcaccgtagtgagagtgcgttcaaggctcttgcggttgccataagagaagccacctcgcccaatggtaccaacgatgttccctccaccaaaggtgttcttatgtagtgacaccgattatttaaagctgcagcatacgatatatatacatgtgtatatatgtatacctatgaatgtcagtaagtatgtatacgaacagtatgatactgaagatgacaaggtaatgcatcattctatacgtgtcattctgaacgaggcgcgctttccttttttctttttgctttttctttttttttctcttgaactcgacggatctatgcggtgtgaaataccgcacagatgcgtaaggagaaaataccgcatcaggaaattgtaaacgttaatattttgttaaaattcgcgttaaatttttgttaaatcagctcattttttaaccaataggccgaaatcggcaaaatcccttataaatcaaaagaatagaccgagatagggttgagtgttgttccagtttggaacaagagtccactattaaagaacgtggactccaacgtcaaagggcgaaaaaccgtctatcagggcgatggcccactacgtgaaccatcaccctaatcaagttttttggggtcgaggtgccgtaaagcactaaatcggaaccctaaagggagcccccgatttagagcttgacggggaaagccggcgaacgtggcgagaaaggaagggaagaaagcgaaaggagcgggcgctagggcgctggcaagtgtagcggtcacgctgcgcgtaaccaccacacccgccgcgcttaatgcgccgctacagggcgcgtcgcgccattcgccattcaggctgcgcaactgttgggaagggcgatcggtgcgggcctcttcgctattacgccagctggcgaaagggggatgtgctgcaaggcgattaagttgggtaacgccagggttttcccagtcacgacgttgtaaaacgacggccagtgagcgcgcgtaatacgactcactatagggcgaattgggtaccgggccccccctcgaggtcgacggtatcgataagcttgattagaagccgccgagcgggcgacagccctccgacggaagactctcctccgtgcgtcctcgtcttcaccggtcgcgttcctgaaacgcagatgtgcctcgcgccgcactgctccgaacaataaagattctacaatactagcttttatggttatgaagaggaaaaattggcagtaacctggccccacaaaccttcaaattaacgaatcaaattaacaaccataggatgataatgcgattagttttttagccttatttctggggtaattaatcagcgaagcgatgatttttgatctattaacagatatataaatggaaaagctgcataaccactttaactaatactttcaacattttcagtttgtattacttcttattcaaatgtcataaaagtatcaacaaaaaattgttaatatacctctatactttaacgtcaaggagaaaaatgtccaatttactgcccgtacaccaaaatttgcctgcattaccggtcgatgcaacgagtgatgaggttcgcaagaacctgatggacatgttcagggatcgccaggcgttttctgagcatacctggaaaatgcttctgtccgtttgccggtcgtgggcggcatggtgcaagttgaataaccggaaatggtttcccgcagaacctgaagatgttcgcgattatcttctatatcttcaggcgcgcggtctggcagtaaaaactatccagcaacatttgggccagctaaacatgcttcatcgtcggtccgggctgccacgaccaagtgacagcaatgctgtttcactggttatgcggcggatccgaaaagaaaacgttgatgccggtgaacgtgcaaaacaggctctagcgttcgaacgcactgatttcgaccaggttcgttcactcatggaaaatagcgatcgctgccaggatatacgtaatctggcatttctggggattgcttataacaccctgttacgtatagccgaaattgccaggatcagggttaaagatatctcacgtactgacggtgggagaatgttaatccatattggcagaacgaaaacgctggttagcaccgcaggtgtagagaaggcacttagcctgggggtaactaaactggtcgagcgatggatttccgtctctggtgtagctgatgatccgaataactacctgttttgccgggtcagaaaaaatggtgttgccgcgccatctgccaccagccagctatcaactcgcgccctggaagggatttttgaagcaactcatcgattgatttacggcgctaaggatgactctggtcagagatacctggcctggtctggacacagtgcccgtgtcggagccgcgcgagatatggcccgcgctggagtttcaataccggagatcatgcaagctggtggctggaccaatgtaaatattgtcatgaactatatccgtaacctggatagtgaaacaggggcaatggtgcgcctgctggaagatggcgattaggagtaagcgaatttcttatgatttatgatttttattattaaataagttataaaaaaaataagtgtatacaaattttaaagtgactcttaggttttaaaacgaaaattcttattcttgagtaactctttcctgtaggtcaggttgctttctcaggtatagcatgaggtcgctcttattgaccacacctctaccggcatgccgagcaaatgcctgcaaatcgctccccatttcacccaattgtagatatgctaactccagcaatgagttgatgaatctcggtgtgtattttatgtcctcagaggacaacacctgtggtgttctagagcggccgccaccgcggtggagctccagcttttgttccctttagtgagggttaattgcgcgcttggcgtaatcatggtcatagctgtttcctgtgtgaaattgttatccgctcacaattccacacaacataggagccggaagcataaagtgtaaagcctggggtgcctaatgagtgaggtaactcacattaattgcgttgcgctcactgcccgctttccagtcgggaaacctgtcgtgccagctgcattaatgaatcggccaacgcgcggggagaggcggtttgcgtattgggcgctcttccgcttcctcgctcactgactcgctgcgctcggtcgttcggctgcggcgagcggtatcagctcactcaaaggcggtaatacggttatccacagaatcaggggataacgcaggaaagaacatgtgagcaaaaggccagcaaaaggccaggaaccgtaaaaaggccgcgttgctggcgtttttccataggctccgcccccctgacgagcatcacaaaaatcgacgctcaagtcagaggtggcgaaacccgacaggactataaagataccaggcgtttccccctggaagctccctcgtgcgctctcctgttccgaccctgccgcttaccggatacctgtccgcctttctcccttcgggaagcgtggcgctttctcatagctcacgctgtaggtatctcagttcggtgtaggtcgttcgctccaagctgggctgtgtgcacgaaccccccgttcagcccgaccgctgcgccttatccggtaactatcgtcttgagtccaacccggtaagacacgacttatcgccactggcagcagccactggtaacaggattagcagagcgaggtatgtaggcggtgctacagagttcttgaagtggtggcctaactacggctacactagaaggacagtatttggtatctgcgctctgctgaagccagttaccttcggaaaaagagttggtagctcttgatccggcaaacaaaccaccgctggtagcggtggtttttttgtttgcaagcagcagattacgcgcagaaaaaaaggatctcaagaagatcctttgatcttttctacggggtctgacgctcagtggaacgaaaactcacgttaagggattttggtcatgagattatcaaaaaggatcttcacctagatccttttaaattaaaaatgaagttttaaatcaatctaaagtatatatgagtaaacttggtctgacagttaccaatgcttaatcagtgaggcacctatctcagcgatctgtctatttcgttcatccatagttgcctgactccccgtcgtgtagataactacgatacgggagggcttaccatctggccccagtgctgcaatgataccgcgagacccacgctcaccggctccagatttatcagcaataaaccagccagccggaagggccgagcgcagaagtggtcctgcaactttatccgcctccatccagtctattaattgttgccgggaagctagagtaagtagttcgccagttaatagtttgcgcaacgttgttgccattgctacaggcatcgtggtgtcacgctcgtcgtttggtatggcttcattcagctccggttcccaacgatcaaggcgagttacatgatcccccatgttgtgcaaaaaagcggttagctccttcggtcctccgatcgttgtcagaagtaagttggccgcagtgttatcactcatggttatggcagcactgcataattctcttactgtcatgccatccgtaagatgcttttctgtgactggtgagtactcaaccaagtcattctgagaatagtgtatgcggcgaccgagttgctcttgcccggcgtcaatacgggataataccgcgccacatagcagaactttaaaagtgctcatcattggaaaacgttcttcggggcgaaaactctcaaggatcttaccgctgttgagatccagttcgatgtaacccactcgtgcacccaactgatcttcagcatcttttactttcaccagcgtttctgggtgagcaaaaacaggaaggcaaaatgccgcaaaaaagggaataagggcgacacggaaatgttgaatactcatactcttcctttttcaatattattgaagcatttatcagggttattgtctcatgagcggatacatatttgaatgtatttagaaaaataaacaaataggggttccgcgcacatttccccgaaaagtgccacctgaacgaagcatctgtgcttcattttgtagaacaaaaatgcaacgcgagagcgctaatttttcaaacaaagaatctgagctgcatttttacagaacagaaatgcaacgcgaaagcgctattttaccaacgaagaatctgtgcttcatttttgtaaaacaaaaatgcaacgcgagagcgctaatttttcaaacaaagaatctgagctgcatttttacagaacagaaatgcaacgcgagagcgctattttaccaacaaagaatctatacttcttttttgttctacaaaaatgcatcccgagagcgctatttttctaacaaagcatcttagattactttttttctcctttgtgcgctctataatgcagtctcttgataactttttgcactgtaggtccgttaaggttagaagaaggctactttggtgtctattttctcttccataaaaaaagcctgactccacttcccgcgtttactgattactagcgaagctgcgggtgcattttttcaagataaaggcatccccgattatattctataccgatgtggattgcgcatactttgtgaacagaaagtgatagcgttgatgattcttcattggtcagaaaattatgaacggtttcttctattttgtctctatatactacgtataggaaatgtttacattttcgtattgttttcgattcactctatgaatagttcttactacaatttttttgtctaaagagtaatactagagataaacataaaaaatgtagaggtcgagtttagatgcaagttcaaggagcgaaaggtggatgggtaggttatatagggatatagcacagagatatatagcaaagagatacttttgagcaatgtttgtggaagcggtattcgcaatattttagtagctcgttacagtccggtgcgtttttggttttttgaaagtgcgtcttcagagcgcttttggttttcaaaagcgctctgaagttcctatactttctagagaataggaacttcggaataggaacttcaaagcgtttccgaaaacgagcgcttccgaaaatgcaacgcgagctgcgcacatacagctcactgttcacgtcgcacctatatctgcgtgttgcctgtatatatatatacatgagaagaacggcatagtgcgtgtttatgcttaaatgcgtacttatatgcgtctatttatgtaggatgaaaggtagtctagtacctcctgtgatattatcccattccatgcggggtatcgtatgcttccttcagcactaccctttagctgttctatatgctgccactcctcaattggattagtctcatccttcaatgctatcatttcctttgatattggatcatctaagaaaccattattatcatgacattaacctataaaaataggcgtatcacgaggccctttcgtc

SEQ ID NO: 190 - DNA, 22 bp, Artificial Sequence
  oBP440 primer
tacgtacggaccaatcgaagtg

SEQ ID NO: 191 - DNA, 49 bp, Artificial Sequence
  oBP441 primer
aattcgtttgagtacactactaatggctttgttggcaatatgtttttgc

SEQ ID NO: 192 - DNA, 49 bp, Artificial Sequence
  oBP442 primer
atatagcaaaaacatattgccaacaaagccattagtagtgtactcaaac

SEQ ID NO: 193 - DNA, 49 bp, Artificial Sequence
  oBP443 primer
tatggaccctgaaaccacagccacattcttgttatttataaaaagacac

SEQ ID NO: 194 - DNA, 49 bp, Artificial Sequence
  oBP444 primer
ctcccgtgtctttttataaataacaagaatgtggctgtggtttcagggt

SEQ ID NO: 195 - DNA, 49 bp, Artificial Sequence
  oBP445 primer
taccgtaggcgtccttaggaaagatagaaggccatgaagctttttcttt

SEQ ID NO: 196 - DNA, 49 bp, Artificial Sequence
  oBP446 primer
attggaaagaaaaagcttcatggccttctatctttcctaaggacgccta

SEQ ID NO: 197 - DNA, 21 bp, Artificial Sequence
  oBP447 primer
ttattgtttggcatttgtagc

SEQ ID NO: 198 - DNA, 22 bp, Artificial Sequence
  oBP448 primer
ccaagcatctcataaacctatg

SEQ ID NO: 199 - DNA, 22 bp, Artificial Sequence
  oBP449 primer
tgtgcagatgcagatgtgagac

SEQ ID NO: 200 - DNA, 17 bp, Artificial Sequence
  oBP554 primer
agttattgataccgtac

SEQ ID NO: 201 - DNA, 19 bp, Artificial Sequence
  oBP555 primer
cgagataccgtaggcgtcc

SEQ ID NO: 202 - DNA, 24 bp, Artificial Sequence
  oBP513 primer
ttatgtatgctcttctgacttttc

SEQ ID NO: 203 - DNA, 49 bp, Artificial Sequence
  oBP515 primer
aataattagagattaaatcgctcattttttgccagtttcttcaggcttc

SEQ ID NO: 204 - DNA, 49 bp, Artificial Sequence
  oBP516 primer
agcctgaagaaactggcaaaaaatgagcgatttaatctctaattattag

SEQ ID NO: 205 - DNA, 49 bp, Artificial Sequence
  oBP517 primer
tatggaccctgaaaccacagccacatttttcaatcattggagcaatcat

SEQ ID NO: 206 - DNA, 49 bp, Artificial Sequence
  oBP518 primer
taaaatgattgctccaatgattgaaaaatgtggctgtggtttcagggtc

SEQ ID NO: 207 - DNA, 49 bp, Artificial Sequence
  oBP519 primer
accgtaggtgttgtttgggaaagtggaaggccatgaagctttttctttc

SEQ ID NO: 208 - DNA, 49 bp, Artificial Sequence
  oBP520 primer
ttggaaagaaaaagcttcatggccttccactttcccaaacaacacctac

SEQ ID NO: 209 - DNA, 23 bp, Artificial Sequence
  oBP521 primer
ttattgcttagcgttggtagcag

SEQ ID NO: 210 - DNA, 21 bp, Artificial Sequence
  oBP511 primer
tttttggtggttccggcttcc

SEQ ID NO: 211 - DNA, 22 bp, Artificial Sequence
  oBP512 primer
aaagttggcatagcggaaactt

SEQ ID NO: 212 - DNA, 16 bp, Artificial Sequence
  oBP550 primer
gtcattgacaccatct

SEQ ID NO: 213 - DNA, 19 bp, Artificial Sequence
  oBP551 primer
agagataccgtaggtgttg

SEQ ID NO: 214 - DNA, 28 bp, Artificial Sequence
  ilvDSm(1354F) primer
ggaccaaagggcggtcctggtatgcctg

SEQ ID NO: 215 - DNA, 26 bp, Artificial Sequence
  ilvDSm(788R) primer
gcttcacgcgttaaaatgtcagaagg

SEQ ID NO: 216 - DNA, 23 bp, Artificial Sequence
  MAT1 primer
agtcacatcaagatcgtttatgg

SEQ ID NO: 217 - DNA, 23 bp, Artificial Sequence
  MAT2 primer
gcacggaatatgggcatacttcg

SEQ ID NO: 218 - DNA, 23 bp, Artificial Sequence
  MAT3 primer
actccacttcaagtaagagtttg

SEQ ID NO: 219 - DNA, 29 bp, Artificial Sequence
  T-A(PDC5) primer
ctgtcgctaacacctgtatggttgcaacc

SEQ ID NO: 220 - DNA, 48 bp, Artificial Sequence
  B-A(kivD) primer
gatagtcacctactgtatacattttgttcttcttgttattgtattgtg

SEQ ID NO: 221 - DNA, 15539 bp, Artificial Sequence
  pLH468 plasmid
tcgcgcgtttcggtgatgacggtgaaaacctctgacacatgcagctcccggagacggtcacagcttgtctgtaagcggatgccgggagcagacaagcccgtcagggcgcgtcagcgggtgttggcgggtgtcggggctggcttaactatgcggcatcagagcagattgtactgagagtgcaccataaattcccgttttaagagcttggtgagcgctaggagtcactgccaggtatcgtttgaacacggcattagtcagggaagtcataacacagtcctttcccgcaattttctttttctattactcttggcctcctctagtacactctatatttttttatgcctcggtaatgattttcatttttttttttccacctagcggatgactctttttttttcttagcgattggcattatcacataatgaattatacattatataaagtaatgtgatttcttcgaagaatatactaaaaaatgagcaggcaagataaacgaaggcaaagatgacagagcagaaagccctagtaaagcgtattacaaatgaaaccaagattcagattgcgatctctttaaagggtggtcccctagcgatagagcactcgatcttcccagaaaaagaggcagaagcagtagcagaacaggccacacaatcgcaagtgattaacgtccacacaggtatagggtttctggaccatatgatacatgctctggccaagcattccggctggtcgctaatcgttgagtgcattggtgacttacacatagacgaccatcacaccactgaagactgcgggattgctctcggtcaagcttttaaagaggccctaggggccgtgcgtggagtaaaaaggtttggatcaggatttgcgcctttggatgaggcactttccagagcggtggtagatctttcgaacaggccgtacgcagttgtcgaacttggtttgcaaagggagaaagtaggagatctctcttgcgagatgatcccgcattttcttgaaagctttgcagaggctagcagaattaccctccacgttgattgtctgcgaggcaagaatgatcatcaccgtagtgagagtgcgttcaaggctcttgcggttgccataagagaagccacctcgcccaatggtaccaacgatgttccctccaccaaaggtgttcttatgtagtgacaccgattatttaaagctgcagcatacgatatatatacatgtgtatatatgtatacctatgaatgtcagtaagtatgtatacgaacagtatgatactgaagatgacaaggtaatgcatcattctatacgtgtcattctgaacgaggcgcgctttccttttttctttttgctttttctttttttttctcttgaactcgacggatctatgcggtgtgaaataccgcacagatgcgtaaggagaaaataccgcatcaggaaattgtaagcgttaatattttgttaaaattcgcgttaaatttttgttaaatcagctcattttttaaccaataggccgaaatcggcaaaatcccttataaatcaaaagaatagaccgagatagggttgagtgttgttccagtttggaacaagagtccactattaaagaacgtggactccaacgtcaaagggcgaaaaaccgtctatcagggcgatggcccactacgtgaaccatcaccctaatcaagttttttggggtcgaggtgccgtaaagcactaaatcggaaccctaaagggagcccccgatttagagcttgacggggaaagccggcgaacgtggcgagaaaggaagggaagaaagcgaaaggagcgggcgctagggcgctggcaagtgtagcggtcacgctgcgcgtaaccaccacacccgccgcgcttaatgcgccgctacagggcgcgtccattcgccattcaggctgcgcaactgttgggaagggcgcggtgcgggcctcttcgctattacgccagctggcgaaagggggatgtgctgcaaggcgattaagttgggtaacgccagggttttcccagtcacgacgttgtaaaacgacggccagtgagcgcgcgtaatacgactcactatagggcgaattgggtaccgggccccccctcgaggtcgacggcgcgccactggtagagagcgactttgtatgccccaattgcgaaacccgcgatatccttctcgattctttagtacccgaccaggacaaggaaaaggaggtcgaaacgtttttgaagaaacaagaggaactacacggaagctctaaagatggcaaccagccagaaactaagaaaatgaagttgatggatccaactggcaccgctggcttgaacaacaataccagccttccaacttctgtaaataacggcggtacgccagtgccaccagtaccgttacctttcggtatacctcctttccccatgtttccaatgcccttcatgcctccaacggctactatcacaaatcctcatcaagctgacgcaagccctaagaaatgaataacaatactgacagtactaaataattgcctacttggcttcacatacgttgcatacgtcgatatagataataatgataatgacagcaggattatcgtaatacgtaatagctgaaaatctcaaaaatgtgtgggtcattacgtaaataatgataggaatgggattcttctatttttcctttttccattctagcagccgtcgggaaaacgtggcatcctctctttcgggctcaattggagtcacgctgccgtgagcatcctctctttccatatctaacaactgagcacgtaaccaatggaaaagcatgagcttagcgttgctccaaaaaagtattggatggttaataccatttgtctgttctcttctgactttgactcctcaaaaaaaaaaatctacaatcaacagatcgcttcaattacgccctcacaaaaacttttttccttcttcttcgcccacgttaaattttatccctcatgttgtctaacggatttctgcacttgatttattataaaaagacaaagacataatacttctctatcaatttcagttattgttcttccttgcgttattcttctgttcttctttttcttttgtcatatataaccataaccaagtaatacatattcaaactagtatgactgacaaaaaaactcttaaagacttaagaaatcgtagttctgtttacgattcaatggttaaatcacctaatcgtgctatgttgcgtgcaactggtatgcaagatgaagactttgaaaaacctatcgtcggtgtcatttcaacttgggctgaaaacacaccttgtaatatccacttacatgactttggtaaactagccaaagtcggtgttaaggaagctggtgcttggccagttcagttcggaacaatcacggtttctgatggaatcgccatgggaacccaaggaatgcgtttctccttgacatctcgtgatattattgcagattctattgaagcagccatgggaggtcataatgcggatgcttttgtagccattggcggttgtgataaaaacatgcccggttctgttatcgctatggctaacatggatatcccagccatttttgcttacggcggaacaattgcacctggtaatttagacggcaaagatatcgatttagtctctgtctttgaaggtgtcggccattggaaccacggcgatatgaccaaagaagaagttaaagctttggaatgtaatgcttgtcccggtcctggaggctgcggtggtatgtatactgctaacacaatggcgacagctattgaagttttgggacttagccttccgggttcatcttctcacccggctgaatccgcagaaaagaaagcagatattgaagaagctggtcgcgctgttgtcaaaatgctcgaaatgggcttaaaaccttctgacattttaacgcgtgaagcttttgaagatgctattactgtaactatggctctgggaggttcaaccaactcaacccttcacctcttagctattgcccatgctgctaatgtggaattgacacttgatgatttcaatactttccaagaaaaagttcctcatttggctgatttgaaaccttctggtcaatatgtattccaagacctttacaaggtcggaggggtaccagcagttatgaaatatctccttaaaaatggcttccttcatggtgaccgtatcacttgtactggcaaaacagtcgctgaaaatttgaaggcttttgatgatttaacacctggtcaaaaggttattatgccgcttgaaaatcctaaacgtgaagatggtccgctcattattctccatggtaacttggctccagacggtgccgttgccaaagtttctggtgtaaaagtgcgtcgtcatgtcggtcctgctaaggtctttaattctgaagaagaagccattgaagctgtcttgaatgatgatattgttgatggtgatgttgttgtcgtacgttttgtaggaccaaagggcggtcctggtatgcctgaaatgctttccctttcatcaatgattgttggtaaagggcaaggtgaaaaagttgcccttctgacagatggccgcttctcaggtggtacttatggtcttgtcgtgggtcatatcgctcctgaagcacaagatggcggtccaatcgcctacctgcaaacaggagacatagtcactattgaccaagacactaaggaattacactttgatatctccgatgaagagttaaaacatcgtcaagagaccattgaattgccaccgctctattcacgcggtatccttggtaaatatgctcacatcgtttcgtctgcttctaggggagccgtaacagacttttggaagcctgaagaaactggcaaaaaatgttgtcctggttgctgtggttaagcggccgcgttaattcaaattaattgatatagttttttaatgagtattgaatctgtttagaaataatggaatattatttttatttatttatttatattattggtcggctcttttcttctgaaggtcaatgacaaaatgatatgaaggaaataatgatttctaaaattttacaacgtaagatatttttacaaaagcctagctcatcttttgtcatgcactattttactcacgcttgaaattaacggccagtccactgcggagtcatttcaaagtcatcctaatcgatctatcgtttttgatagctcattttggagttcgcgattgtcttctgttattcacaactgttttaatttttatttcattctggaactcttcgagttctttgtaaagtctttcatagtagcttactttatcctccaacatatttaacttcatgtcaatttcggctcttaaattttccacatcatcaagttcaacatcatcttttaacttgaatttattctctagctcttccaaccaagcctcattgctccttgatttactggtgaaaagtgatacactttgcgcgcaatccaggtcaaaactttcctgcaaagaattcaccaatttctcgacatcatagtacaatttgttttgttctcccatcacaatttaatatacctgatggattcttatgaagcgctgggtaatggacgtgtcactctacttcgcctttttccctactccttttagtacggaagacaatgctaataaataagagggtaataataatattattaatcggcaaaaaagattaaacgccaagcgtttaattatcagaaagcaaacgtcgtaccaatccttgaatgcttcccaattgtatattaagagtcatcacagcaacatattcttgttattaaattaattattattgatttttgatattgtataaaaaaaccaaatatgtataaaaaaagtgaataaaaaataccaagtatggagaaatatattagaagtctatacgttaaaccacccgggccccccctcgaggtcgacggtatcgataagcttgatatcgaattcctgcagcccgggggatccactagttctagagcggccgctctagaactagtaccacaggtgttgtcctctgaggacataaaatacacaccgagattcatcaactcattgctggagttagcatatctacaattgggtgaaatggggagcgatttgcaggcatttgctcggcatgccggtagaggtgtggtcaataagagcgacctcatgctatacctgagaaagcaacctgacctacaggaaagagttactcaagaataagaattttcgttttaaaacctaagagtcactttaaaatttgtatacacttattttttttataacttatttaataataaaaatcataaatcataagaaattcgcttactcttaattaatcaaaaagttaaaattgtacgaatagattcaccacttcttaacaaatcaaacccttcattgattttctcgaatggcaatacatgtgtaattaaaggatcaagagcaaacttcttcgccataaagtcggcaacaagttttggaacactatccttgctcttaaaaccgccaaatatagctcccttccatgtacgaccgcttagcaacagcataggattcatcgacaaattttgtgaatcaggaggaacacctacgatcacactgactccatatgcctcttgacagcaggacaacgcagttaccatagtatcaagacggcctataacttcaaaagagaaatcaactccaccgtttgacatttcagtaaggacttcttgtattggtttcttataatcttgagggttaacacattcagtagccccgacctccttagcttttgcaaatttgtccttattgatgtctacacctataatcctcgctgcgcctgcagctttacaccccataataacgcttagtcctactcctcctaaaccgaatactgcacaagtcgaaccctgtgtaacctttgcaactttaactgcggaaccgtaaccggtggaaaatccgcaccctatcaagcaaactttttccagtggtgaagctgcatcgattttagcgacagatatctcgtccaccactgtgtattgggaaaatgtagaagtaccaaggaaatggtgtataggtttccctctgcatgtaaatctgcttgtaccatcctgcatagtacctctaggcatagacaaatcatttttaaggcagaaattaccctcaggatgtttgcagactctacacttaccacattgaggagtgaacagtgggatcactttatcaccaggacgaacagtggtaacaccttcacctatggattcaacgattccggcagcctcgtgtcccgcgattactggcaaaggagtaactagagtgccactcaccacatggtcgtcggatctacagattccggtggcaaccatcttgattctaacctcgtgtgcttttggtggcgctacttctacttcttctatgctaaacggctttttctcttcccacaaaactgccgctttacacttaataactttaccggctgttgacatcctcagctagctattgtaatatgtgtgtttgtttggattattaagaagaataattacaaaaaaaattacaaaggaaggtaattacaacagaattaagaaaggacaagaaggaggaagagaatcagttcattatttcttctttgttatataacaaacccaagtagcgatttggccatacattaaaagttgagaaccaccctccctggcaacagccacaactcgttaccattgttcatcacgatcatgaaactcgctgtcagctgaaatttcacctcagtggatctctctttttattcttcatcgttccactaacctttttccatcagctggcagggaacggaaagtggaatcccatttagcgagcttcctcttttcttcaagaaaagacgaagcttgtgtgtgggtgcgcgcgctagtatctttccacattaagaaatataccataaaggttacttagacatcactatggctatatatatatatatatatatatgtaacttagcaccatcgcgcgtgcatcactgcatgtgttaaccgaaaagtttggcgaacacttcaccgacacggtcatttagatctgtcgtctgcattgcacgtcccttagccttaaatcctaggcgggagcattctcgtgtaattgtgcagcctgcgtagcaactcaacatagcgtagtctacccagtttttcaagggtttatcgttagaagattctcccttttcttcctgctcacaaatcttaaagtcatacattgcacgactaaatgcaagcatgcggatcccccgggctgcaggaattcgatatcaagcttatcgataccgtcgactggccattaatctttcccatattagatttcgccaagccatgaaagttcaagaaaggtctttagacgaattacccttcatttctcaaactggcgtcaagggatcctggtatggttttatcgttttatttctggttcttatagcatcgttttggacttctctgttcccattaggcggttcaggagccagcgcagaatcattctttgaaggatacttatcctttccaattttgattgtctgttacgttggacataaactgtatactagaaattggactttgatggtgaaactagaagatatggatcttgataccggcagaaaacaagtagatttgactcttcgtagggaagaaatgaggattgagcgagaaacattagcaaaaagatccttcgtaacaagatttttacatttctggtgttgaagggaaagatatgagctatacagcggaatttccatatcactcagattttgttatctaattttttccttcccacgtccgcgggaatctgtgtatattactgcatctagatatatgttatcttatcttggcgcgtacatttaattttcaacgtattctataagaaattgcgggagtttttttcatgtagatgatactgactgcacgcaaatataggcatgatttataggcatgatttgatggctgtaccgataggaacgctaagagtaacttcagaatcgttatcctggcggaaaaaattcatttgtaaactttaaaaaaaaaagccaatatccccaaaattattaagagcgcctccattattaactaaaatttcactcagcatccacaatgtatcaggtatctactacagatattacatgtggcgaaaaagacaagaacaatgcaatagcgcatcaagaaaaaacacaaagctttcaatcaatgaatcgaaaatgtcattaaaatagtatataaattgaaactaagtcataaagctataaaaagaaaatttatttaaatgcaagatttaaagtaaattcacggccctgcaggcctcagctcttgttttgttctgcaaataacttacccatctttttcaaaactttaggtgcaccctcctttgctagaataagttctatccaatacatcctatttggatctgcttgagcttctttcatcacggatacgaattcattttctgttctcacaattttggacacaactctgtcttccgttgccccgaaactttctggcagttttgagtaattccacataggaatgtcattataactctggttcggaccatgaatttccctctcaaccgtgtaaccatcgttattaatgataaagcagattgggtttatcttctctctaatggctagtcctaattcttggacagtcagttgcaatgatccatctccgataaacaataaatgtctagattctttatctgcaatttggctgcctagagctgcggggaaagtgtatcctatagatccccacaagggttgaccaataaaatgtgatttcgatttcagaaatatagatgaggcaccgaagaaagaagtgccttgttcagccacgatcgtctcattactttgggtcaaattttcgacagcttgccacagtctatcttgtgacaacagcgcgttagaaggtacaaaatcttcttgctttttatctatgtacttgcctttatattcaatttcggacaagtcaagaagagatgatatcagggattcgaagtcgaaattttggattctttcgttgaaaattttaccttcatcgatattcaaggaaatcattttattttcattaagatggtgagtaaatgcacccgtactagaatcggtaagctttacacccaacataagaataaaatcagcagattccacaaattccttcaagtttggctctgacagagtaccgttgtaaatccccaaaaatgagggcaatgcttcatcaacagatgatttaccaaagttcaaagtagtaataggtaacttagtctttgaaataaactgagtaacagtcttctctaggccgaacgatataatttcatggcctgtgattacaattggtttcttggcattcttcagactttcctgtattttgttcagaatctcttgatcagatgtattcgacgtggaattttccttcttaagaggcaaggatggtttttcagccttagcggcagctacatctacaggtaaattgatgtaaaccggctttctttcctttagtaaggcagacaacactctatcaatttcaacagttgcattctcggctgtcaataaagtcctggcagcagtaaccggttcgtgcatcttcataaagtgcttgaaatcaccatcagccaacgtatggtgaacaaacttaccttcgttctgcactttcgaggtaggagatcccacgatctcaacaacaggcaggttctcagcataggagcccgctaagccattaactgcggataattcgccaacaccaaatgtagtcaagaatgccgcagcctttttcgttcttgcgtacccgtcggccatataggaggcatttaactcattagcatttcccacccatttcatatctttgtgtgaaataatttgatctagaaattgcaaattgtagtcacctggtactccgaatatttcttctatacctaattcgtgtaatctgtccaacagatagtcacctactgtatacattttgtttactagtttatgtgtgtttattcgaaactaagttcttggtgttttaaaactaaaaaaaagactaactataaaagtagaatttaagaagtttaagaaatagatttacagaattacaatcaatacctaccgtctttatatacttattagtcaagtaggggaataatttcagggaactggtttcaaccttttttttcagctttttccaaatcagagagagcagaaggtaatagaaggtgtaagaaaatgagatagatacatgcgtgggtcaattgccttgtgtcatcatttactccaggcaggttgcatcactccattgaggttgtgcccgttttttgcctgtttgtgcccctgttctctgtagttgcgctaagagaatggacctatgaactgatggttggtgaagaaaacaatattttggtgctgggattctttttttttctggatgccagcttaaaaagcgggctccattatatttagtggatgccaggaataaactgttcacccagacacctacgatgttatatattctgtgtaacccgccccctattttgggcatgtacgggttacagcagaattaaaaggctaattttttgactaaataaagttaggaaaatcactactattaattatttacgtattctttgaaatggcagtattgataatgataaactcgaactgaaaaagcgtgttttttattcaaaatgattctaactcccttacgtaatcaaggaatctttttgccttggcctccgcgtcattaaacttcttgttgttgacgctaacattcaacgctagtatatattcgtttttttcaggtaagttcttttcaacgggtcttactgatgaggcagtcgcgtctgaacctgttaagaggtcaaatatgtcttcttgaccgtacgtgtcttgcatgttattagctttgggaatttgcatcaagtcataggaaaatttaaatcttggctctcttgggctcaaggtgacaaggtcctcgaaaatagggcgcgccccaccgcggtggagctccagcttttgttccctttagtgagggttaattgcgcgcttggcgtaatcatggtcatagctgtttcctgtgtgaaattgttatccgctcacaattccacacaacatacgagccggaagcataaagtgtaaagcctggggtgcctaatgagtgagctaactcacattaattgcgttgcgctcactgcccgctttccagtcgggaaacctgtcgtgccagctgcattaatgaatcggccaacgcgcggggagaggcggtttgcgtattgggcgctcttccgcttcctcgctcactgactcgctgcgctcggtcgttcggctgcggcgagcggtatcagctcactcaaaggcggtaatacggttatccacagaatcaggggataacgcaggaaagaacatgtgagcaaaaggccagcaaaaggccaggaaccgtaaaaaggccgcgttgctggcgtttttccataggctccgcccccctgacgagcatcacaaaaatcgacgctcaagtcagaggtggcgaaacccgacaggactataaagataccaggcgtttccccctggaagctccctcgtgcgctctcctgttccgaccctgccgcttaccggatacctgtccgcctttctcccttcgggaagcgtggcgctttctcatagctcacgctgtaggtatctcagttcggtgtaggtcgttcgctccaagctgggctgtgtgcacgaaccccccgttcagcccgaccgctgcgccttatccggtaactatcgtcttgagtccaacccggtaagacacgacttatcgccactggcagcagccactggtaacaggattagcagagcgaggtatgtaggcggtgctacagagttcttgaagtggtggcctaactacggctacactagaagaacagtatttggtatctgcgctctgctgaagccagttaccttcggaaaaagagttggtagctcttgatccggcaaacaaaccaccgctggtagcggtggtttttttgtttgcaagcagcagattacgcgcagaaaaaaaggatctcaagaagatcctttgatcttttctacggggtctgacgctcagtggaacgaaaactcacgttaagggattttggtcatgagattatcaaaaaggatcttcacctagatccttttaaattaaaaatgaagttttaaatcaatctaaagtatatatgagtaaacttggtctgacagttaccaatgcttaatcagtgaggcacctatctcagcgatctgtctatttcgttcatccatagttgcctgactccccgtcgtgtagataactacgatacgggagggcttaccatctggccccagtgctgcaatgataccgcgagacccacgctcaccggctccagatttatcagcaataaaccagccagccggaagggccgagcgcagaagtggtcctgcaactttatccgcctccatccagtctattaattgttgccgggaagctagagtaagtagttcgccagttaatagtttgcgcaacgttgttgccattgctacaggcatcgtggtgtcacgctcgtcgtttggtatggcttcattcagctccggttcccaacgatcaaggcgagttacatgatcccccatgttgtgcaaaaaagcggttagctccttcggtcctccgatcgttgtcagaagtaagttggccgcagtgttatcactcatggttatggcagcactgcataattctcttactgtcatgccatccgtaagatgcttttctgtgactggtgagtactcaaccaagtcattctgagaatagtgtatgcggcgaccgagttgctcttgcccggcgtcaatacgggataataccgcgccacatagcagaactttaaaagtgctcatcattggaaaacgttcttcggggcgaaaactctcaaggatcttaccgctgttgagatccagttcgatgtaacccactcgtgcacccaactgatcttcagcatcttttactttcaccagcgtttctgggtgagcaaaaacaggaaggcaaaatgccgcaaaaaagggaataagggcgacacggaaatgttgaatactcatactcttcctttttcaatattattgaagcatttatcagggttattgtctcatgagcggatacatatttgaatgtatttagaaaaataaacaaataggggttccgcgcacatttccccgaaaagtgccacctgaacgaagcatctgtgcttcattttgtagaacaaaaatgcaacgcgagagcgctaatttttcaaacaaagaatctgagctgcatttttacagaacagaaatgcaacgcgaaagcgctattttaccaacgaagaatctgtgcttcatttttgtaaaacaaaaatgcaacgcgagagcgctaatttttcaaacaaagaatctgagctgcatttttacagaacagaaatgcaacgcgagagcgctattttaccaacaaagaatctatacttcttttttgttctacaaaaatgcatcccgagagcgctatttttctaacaaagcatcttagattactttttttctcctttgtgcgctctataatgcagtctcttgataactttttgcactgtaggtccgttaaggttagaagaaggctactttggtgtctattttctcttccataaaaaaagcctgactccacttcccgcgtttactgattactagcgaagctgcgggtgcattttttcaagataaaggcatccccgattatattctataccgatgtggattgcgcatactttgtgaacagaaagtgatagcgttgatgattcttcattggtcagaaaattatgaacggtttcttctattttgtctctatatactacgtataggaaatgtttacattttcgtattgttttcgattcactctatgaatagttcttactacaatttttttgtctaaagagtaatactagagataaacataaaaaatgtagaggtcgagtttagatgcaagttcaaggagcgaaaggtggatgggtaggttatatagggatatagcacagagatatatagcaaagagatacttttgagcaatgtttgtggaagcggtattcgcaatattttagtagctcgttacagtccggtgcgtttttggttttttgaaagtgcgtcttcagagcgcttttggttttcaaaagcgctctgaagttcctatactttctagagaataggaacttcggaataggaacttcaaagcgtttccgaaaacgagcgcttccgaaaatgcaacgcgagctgcgcacatacagctcactgttcacgtcgcacctatatctgcgtgttgcctgtatatatatatacatgagaagaacggcatagtgcgtgtttatgcttaaatgcgtacttatatgcgtctatttatgtaggatgaaaggtagtctagtacctcctgtgatattatcccattccatgcggggtatcgtatgcttccttcagcactaccctttagctgttctatatgctgccactcctcaattggattagtctcatccttcaatgctatcatttcctttgatattggatcatactaagaaaccattattatcatgacattaacctataaaaataggcgtatcacgaggccctttcgtc

SEQ ID NO: 222 - DNA, 57 bp, Artificial Sequence
  T-kivD(A) primer
acacaatacaataacaagaagaacaaaatgtatacagtaggtgactatctgttggac

SEQ ID NO: 223 - DNA, 56 bp, Artificial Sequence
  B-kivD(B) primer
tcaggcagcgcctgcgttcgagtcagctcttgttttgttctgcaaataacttaccc

SEQ ID NO: 224 - DNA, 5231 bp, Artificial Sequence
  pUC19-URA3-sadB-PDC5fragmentB plasmid
tcgcgcgtttcggtgatgacggtgaaaacctctgacacatgcagctcccggagacggtcacagcttgtctgtaagcggatgccgggagcagacaagcccgtcagggcgcgtcagcgggtgttggcgggtgtcggggctggcttaactatgcggcatcagagcagattgtactgagagtgcaccatatgcggtgtgaaataccgcacagatgcgtaaggagaaaataccgcatcaggcgccattcgccattcaggctgcgcaactgttgggaagggcgatcggtgcgggcctcttcgctattacgccagctggcgaaagggggatgtgctgcaaggcgattaagttgggtaacgccagggttttcccagtcacgacgttgtaaaacgacggccagtgaattcgagctcggtacccggggatccggcgcgccatgaaagctctggtttatcacggtgaccacaagatctcgcttgaagacaagcccaagcccacccttcaaaagcccacggatgtagtagtacgggttttgaagaccacgatctgcggcacggatctcggcatctacaaaggcaagaatccagaggtcgccgacgggcgcatcctgggccatgaaggggtaggcgtcatcgaggaagtgggcgagagtgtcacgcagttcaagaaaggcgacaaggtcctgatttcctgcgtcacttcttgcggctcgtgcgactactgcaagaagcagctttactcccattgccgcgacggcgggtggatcctgggttacatgatcgatggcgtgcaggccgaatacgtccgcatcccgcatgccgacaacagcctctacaagatcccccagacaattgacgacgaaatcgccgtcctgctgagcgacatcctgcccaccggccacgaaatcggcgtccagtatgggaatgtccagccgggcgatgcggtggctattgtcggcgcgggccccgtcggcatgtccgtactgttgaccgcccagttctactccccctcgaccatcatcgtgatcgacatggacgagaatcgcctccagctcgccaaggagctcggggcaacgcacaccatcaactccggcacggagaacgttgtcgaagccgtgcataggattgcggcagagggagtcgatgttgcgatcgaggcggtgggcataccggcgacttgggacatctgccaggagatcgtcaagcccggcgcgcacatcgccaacgtcggcgtgcatggcgtcaaggttgacttcgagattcagaagctctggatcaagaacctgacgatcaccacgggactggtgaacacgaacacgacgcccatgctgatgaaggtcgcctcgaccgacaagcttccgttgaagaagatgattacccatcgcttcgagctggccgagatcgagcacgcctatcaggtattcctcaatggcgccaaggagaaggcgatgaagatcatcctctcgaacgcaggcgctgcctgagctaattaacataaaactcatgattcaacgtttgtgtatttttttacttttgaaggttatagatgtttaggtaaataattggcatagatatagttttagtataataaatttctgatttggtttaaaatatcaactattttttttcacatatgttcttgtaattacttttctgtcctgtcttccaggttaaagattagcttctaatattttaggtggtttattatttaattttatgctgattaatttatttacttgtttaaacggccggccaatgtggctgtggtttcagggtccataaagcttttcaattcatcttttttttttttgttcttttttttgattccggtttctttgaaatttttttgattcggtaatctccgagcagaaggaagaacgaaggaaggagcacagacttagattggtatatatacgcatatgtggtgttgaagaaacatgaaattgcccagtattcttaacccaactgcacagaacaaaaacctgcaggaaacgaagataaatcatgtcgaaagctacatataaggaacgtgctgctactcatcctagtcctgttgctgccaagctatttaatatcatgcacgaaaagcaaacaaacttgtgtgcttcattggatgttcgtaccaccaaggaattactggagttagttgaagcattaggtcccaaaatttgtttactaaaaacacatgtggatatcttgactgatttttccatggagggcacagttaagccgctaaaggcattatccgccaagtacaattttttactcttcgaagacagaaaatttgctgacattggtaatacagtcaaattgcagtactctgcgggtgtatacagaatagcagaatgggcagacattacgaatgcacacggtgtggtgggcccaggtattgttagcggtttgaagcaggcggcggaagaagtaacaaaggaacctagaggccttttgatgttagcagaattgtcatgcaagggctccctagctactggagaatatactaagggtactgttgacattgcgaagagcgacaaagattttgttatcggctttattgctcaaagagacatgggtggaagagatgaaggttacgattggttgattatgacacccggtgtgggtttagatgacaagggagacgcattgggtcaacagtatagaaccgtggatgatgtggtctctacaggatctgacattattattgttggaagaggactatttgcaaagggaagggatgctaaggtagagggtgaacgttacagaaaagcaggctgggaagcatatttgagaagatgcggccagcaaaactaaaaaactgtattataagtaaatgcatgtatactaaactcacaaattagagcttcaatttaattatatcagttattacccgggaatctcggtcgtaatgatttctataatgacgaaaaaaaaaaaattggaaagaaaaagcttcatggccttgcggccgcttaattaatctagagtcgacctgcaggcatgcaagcttggcgtaatcatggtcatagctgtttcctgtgtgaaattgttatccgctcacaattccacacaacatacgagccggaagcataaagtgtaaagcctggggtgcctaatgagtgagctaactcacattaattgcgttgcgctcactgcccgctttccagtcgggaaacctgtcgtgccagctgcattaatgaatcggccaacgcgcggggagaggcggtttgcgtattgggcgctcttccgcttcctcgctcactgactcgctgcgctcggtcgttcggctgcggcgagcggtatcagctcactcaaaggcggtaatacggttatccacagaatcaggggataacgcaggaaagaacatgtgagcaaaaggccagcaaaaggccaggaaccgtaaaaaggccgcgttgctggcgtttttccataggctccgcccccctgacgagcatcacaaaaatcgacgctcaagtcagaggtggcgaaacccgacaggactataaagataccaggcgtttccccctggaagctccctcgtgcgctctcctgttccgaccctgccgcttaccggatacctgtccgcctttctcccttcgggaagcgtggcgctttctcatagctcacgctgtaggtatctcagttcggtgtaggtcgttcgctccaagctgggctgtgtgcacgaaccccccgttcagcccgaccgctgcgccttatccggtaactatcgtcttgagtccaacccggtaagacacgacttatcgccactggcagcagccactggtaacaggattagcagagcgaggtatgtaggcggtgctacagagttcttgaagtggtggcctaactacggctacactagaaggacagtatttggtatctgcgctctgctgaagccagttaccttcggaaaaagagttggtagctcttgatccggcaaacaaaccaccgctggtagcggtggtttttttgtttgcaagcagcagattacgcgcagaaaaaaaggatctcaagaagatcctttgatcttttctacggggtctgacgctcagtggaacgaaaactcacgttaagggattttggtcatgagattatcaaaaaggatcttcacctagatccttttaaattaaaaatgaagttttaaatcaatctaaagtatatatgagtaaacttggtctgacagttaccaatgcttaatcagtgaggcacctatctcagcgatctgtctatttcgttcatccatagttgcctgactccccgtcgtgtagataactacgatacgggagggcttaccatctggccccagtgctgcaatgataccgcgagacccacgctcaccggctccagatttatcagcaataaaccagccagccggaagggccgagcgcagaagtggtcctgcaactttatccgcctccatccagtctattaattgttgccgggaagctagagtaagtagttcgccagttaatagtttgcgcaacgttgttgccattgctacaggcatcgtggtgtcacgctcgtcgtttggtatggcttcattcagctccggttcccaacgatcaaggcgagttacatgatcccccatgttgtgcaaaaaagcggttagctccttcggtcctccgatcgttgtcagaagtaagttggccgcagtgttatcactcatggttatggcagcactgcataattctcttactgtcatgccatccgtaagatgcttttctgtgactggtgagtactcaaccaagtcattctgagaatagtgtatgcggcgaccgagttgctcttgcccggcgtcaatacgggataataccgcgccacatagcagaactttaaaagtgctcatcattggaaaacgttcttcggggcgaaaactctcaaggatcttaccgctgttgagatccagttcgatgtaacccactcgtgcacccaactgatcttcagcatcttttactttcaccagcgtttctgggtgagcaaaaacaggaaggcaaaatgccgcaaaaaagggaataagggcgacacggaaatgttgaatactcatactcttcctttttcaatattattgaagcatttatcagggttattgtctcatgagcggatacatatttgaatgtatttagaaaaataaacaaataggggttccgcgcacatttccccgaaaagtgccacctgacgtctaagaaaccattattatcatgacattaacctataaaaataggcgtatcacgaggccctttcgtc

SEQ ID NO: 225 - DNA, 47 bp, Artificial Sequence
  T-B(kivD) primer
atttgcagaacaaaacaagagctgactcgaacgcaggcgctgcctga

SEQ ID NO: 226 - DNA, 49 bp, Artificial Sequence
  oBP546 primer
agcgtatacatctgttgggaaagtagaaggccatgaagctttttctttc

SEQ ID NO: 227 - DNA, 49 bp, Artificial Sequence
  oBP547 primer
ttggaaagaaaaagcttcatggccttctactttcccaacagatgtatac

SEQ ID NO: 228 - DNA, 22 bp, Artificial Sequence
  oBP539 primer
ttattgtttagcgttagtagcg

SEQ ID NO: 229 - DNA, 21 bp, Artificial Sequence
  oBP540 primer
taggcataatcaccgaagaag

SEQ ID NO: 230 - DNA, 29 bp, Artificial Sequence
  kivD(652R) primer
ctgagtaacagtcttctctaggccgaacg

SEQ ID NO: 231 - DNA, 17 bp, Artificial Sequence
  oBP552 primer
agttgttagaactgttg

SEQ ID NO: 232 - DNA, 19 bp, Artificial Sequence
  oBP553 primer
gacgatagcgtatacatct

SEQ ID NO: 233 - DNA, 29 bp, Artificial Sequence
  kivD(602F) primer
caagagattctgaacaaaatacaggaaag

SEQ ID NO: 234 - DNA, 27 bp, Artificial Sequence
  kivD(1250F) primer
ccccgcagctctaggcagccaaattgc

SEQ ID NO: 235 - DNA, 9093 bp, Artificial Sequence
  pRS423-TPI1p-ilvD(y)  plasmid
tcgcgcgtttcggtgatgacggtgaaaacctctgacacatgcagctcccggagacggtcacagcttgtctgtaagcggatgccgggagcagacaagcccgtcagggcgcgtcagcgggtgttggcgggtgtcggggctggcttaactatgcggcatcagagcagattgtactgagagtgcaccataaattcccgttttaagagcttggtgagcgctaggagtcactgccaggtatcgtttgaacacggcattagtcagggaagtcataacacagtcctttcccgcaattttctttttctattactcttggcctcctctagtacactctatatttttttatgcctcggtaatgattttcatttttttttttcccctagcggatgactctttttttttcttagcgattggcattatcacataatgaattatacattatataaagtaatgtgatttcttcgaagaatatactaaaaaatgagcaggcaagataaacgaaggcaaagatgacagagcagaaagccctagtaaagcgtattacaaatgaaaccaagattcagattgcgatctctttaaagggtggtcccctagcgatagagcactcgatcttcccagaaaaagaggcagaagcagtagcagaacaggccacacaatcgcaagtgattaacgtccacacaggtatagggtttctggaccatatgatacatgctctggccaagcattccggctggtcgctaatcgttgagtgcattggtgacttacacatagacgaccatcacaccactgaagactgcgggattgctctcggtcaagcttttaaagaggccctactggcgcgtggagtaaaaaggtttggatcaggatttgcgcctttggatgaggcactttccagagcggtggtagatctttcgaacaggccgtacgcagttgtcgaacttggtttgcaaagggagaaagtaggagatctctcttgcgagatgatcccgcattttcttgaaagctttgcagaggctagcagaattaccctccacgttgattgtctgcgaggcaagaatgatcatcaccgtagtgagagtgcgttcaaggctcttgcggttgccataagagaagccacctcgcccaatggtaccaacgatgttccctccaccaaaggtgttcttatgtagtgacaccgattatttaaagctgcagcatacgatatatatacatgtgtatatatgtatacctatgaatgtcagtaagtatgtatacgaacagtatgatactgaagatgacaaggtaatgcatcattctatacgtgtcattctgaacgaggcgcgctttccttttttctttttgctttttctttttttttctcttgaactcgacggatctatgcggtgtgaaataccgcacagatgcgtaaggagaaaataccgcatcaggaaattgtaaacgttaatattttgttaaaattcgcgttaaatttttgttaaatcagctcattttttaaccaataggccgaaatcggcaaaatcccttataaatcaaaagaatagaccgagatagggttgagtgttgttccagtttggaacaagagtccactattaaagaacgtggactccaacgtcaaagggcgaaaaaccgtctatcagggcgatggcccactacgtgaaccatcaccctaatcaagttttttggggtcgaggtgccgtaaagcactaaatcggaaccctaaagggagcccccgatttagagcttgacggggaaagccggcgaacgtggcgagaaaggaagggaagaaagcgaaaggagcgggcgctagggcgctggcaagtgtagcggtcacgctgcgcgtaaccaccacacccgccgcgcttaatgcgccgctacagggcgcgtcgcgccattcgccattcaggctgcgcaactgttgggaagggcgatcggtgcgggcctcttcgctattacgccagctggcgaaagggggatgtgctgcaaggcgattaagttgggtaacgccagggttttcccagtcacgacgttgtaaaacgacggccagtgagcgcgcgtaatacgactcactatagggcgaattgggtaccgggccccccctcgaggtcgaccctacgttagtgtgagcgggatttaaactgtgaggaccttaatacattcagacacttctgcggtatcaccctacttattcccttcgagattatatctaggaacccatcaggttggtggaagattacccgttctaagacttttcagcttcctctattgatgttacacctggacaccccttttctggcatccagtttttaatcttcagtggcatgtgagattctccgaaattaattaaagcaatcacacaattctctcggataccacctcggttgaaactgacaggtggtttgttacgcatgctaatgcaaaggagcctatatacctttggctcggctgctgtaacagggaatataaagggcagcataatttaggagtttagtgaacttgcaacatttactattttcccttcttacgtaaatatttttctttttaattctaaatcaatctttttcaattttttgtttgtattcttttcttgcttaaatctataactacaaaaaacacatacataaactaaaaactagtatggtacgtcctgtagaaaccccaacccgtgaaatcaaaaaactcgacggcctgtgggcattcagtctggatcgcgaaaactgtggaattgatcagcgttggtgggaaagcgcgttacaagaaagccgggcaattgctgtgccaggcagttttaacgatcagttcgccgatgcagatattcgtaattatgcgggcaacgtctggtatcagcgcgaagtctttataccgaaaggttgggcaggccagcgtatcgtgctgcgtttcgatgcggtcactcattacggcaaagtgtgggtcaataatcaggaagtgatggagcatcagggcggctatactccatttgaagccgatgtcacgccgtatgttattgccgggaaaagtgtacgtatcaccgtttgtgtgaacaacgaactgaactggcagactatcccgccgggaatggtgattaccgacgaaaacggcaagaaaaagcagtcttacttccatgatttctttaactatgccggaatccatcgcagcgtaatgctctacaccacgccgaacacctgggtggacgatatcaccgtggtgacgcatgtcgcgcaagactgtaaccacgcgtctgttgactggcaggtggtggccaatggtgatgtcagcgttgaactgcgtgatgcggatcaacaggtggttgcaactggacaaggcactagcgggactttgcaagtggtgaatccgcacctctggcaaccgggtgaaggttatctctatgaactgtgcgtcacagccaaaagccagacagagtgtgatatctacccgcttcgcgtcggcatccggtcagtggcagtgaagggcgaacagttcctgattaaccacaaaccgttctactttactggctttggtcgtcatgaagatgcggacttgcgtggcaaaggattcgataacgtgctgatggtgcacgaccacgcattaatggactggattggggccaactcctaccgtacctcgcattacccttacgctgaagagatgctcgactgggcagatgaacatggcatcgtggtgattgatgaaactgctgctgtcggctttaacctctctttaggcattggtttcgaagcgggcaacaagccgaaagaactgtacagcgaagaggcagtcaacggggaaactcagcaagcgcacttacaggcgattaaagagctgatagcgcgtgacaaaaaccacccaagcgtggtgatgtggagtattgccaacgaaccggatacccgtccgcaaggtgcacgggaatatttcgcgccactggcggaagcaacgcgtaaactcgacccgacgcgtccgatcacctgcgtcaatgtaatgttctgcgacgctcacaccgataccatcagcgatctctttgatgtgctgtgcctgaaccgttattacggatggtatgtccaaagcggcgatttggaaacggcagagaaggtactggaaaaagaacttctggcctggcaggagaaactgcatcagccgattatcatcaccgaatacggcgtggatacgttagccgggctgcactcaatgtacaccgacatgtggagtgaagagtatcagtgtgcatggctggatatgtatcaccgcgtctttgatcgcgtcagcgccgtcgtcggtgaacaggtatggaatttcgccgattttgcgacctcgcaaggcatattgcgcgttggcggtaacaagaaagggatcttcactcgcgaccgcaaaccgaagtcggcggcttttctgctgcaaaaacgctggactggcatgaacttcggtgaaaaaccgcagcagggaggcaaacaatgattaattaactagagcggccgcgttaattcaaattaattgatatagttttttaatgagtattgaatctgtttagaaataatggaatattatttttatttatttatttatattattggtcggctcttttcttctgaaggtcaatgacaaaatgatatgaaggaaataatgatttctaaaattttacaacgtaagatatttttacaaaagcctagctcatcttttgtcatgcactattttactcacgcttgaaattaacggccagtccactgcggagtcatttcaaagtcatcctaatcgatctatcgtttttgatagctcattttggagttcgcgattgtcttctgttattcacaactgttttaatttttatttcattctggaactcttcgagttctttgtaaagtctttcatagtagcttactttatcctccaacatatttaacttcatgtcaatttcggctcttaaattttccacatcatcaagttcaacatcatcttttaacttgaatttattctctagctcttccaaccaagcctcattgctccttgatttactggtgaaaagtgatacactttgcgcgcaatccaggtcaaaactttcctgcaaagaattcaccaatttctcgacatcatagtacaatttgttttgttctcccatcacaatttaatatacctgatggattcttatgaagcgctgggtaatggacgtgtcactctacttcgcctttttccctactccttttagtacggaagacaatgctaataaataagagggtaataataatattattaatcggcaaaaaagattaaacgccaagcgtttaattatcagaaagcaaacgtcgtaccaatccttgaatgcttcccaattgtatattaagagtcatcacagcaacatattcttgttattaaattaattattattgatttttgatattgtataaaaaaaccaaatatgtataaaaaaagtgaataaaaaataccaagtatggagaaatatattagaagtctatacgttaaaccaccgcggtggagctccagcttttgttccctttagtgagggttaattgcgcgcttggcgtaatcatggtcatagctgtttcctgtgtgaaattgttatccgctcacaattccacacaacataggagccggaagcataaagtgtaaagcctggggtgcctaatgagtgaggtaactcacattaattgcgttgcgctcactgcccgctttccagtcgggaaacctgtcgtgccagctgcattaatgaatcggccaacgcgcggggagaggcggtttgcgtattgggcgctcttccgcttcctcgctcactgactcgctgcgctcggtcgttcggctgcggcgagcggtatcagctcactcaaaggcggtaatacggttatccacagaatcaggggataacgcaggaaagaacatgtgagcaaaaggccagcaaaaggccaggaaccgtaaaaaggccgcgttgctggcgtttttccataggctccgcccccctgacgagcatcacaaaaatcgacgctcaagtcagaggtggcgaaacccgacaggactataaagataccaggcgtttccccctggaagctccctcgtgcgctctcctgttccgaccctgccgcttaccggatacctgtccgcctttctcccttcgggaagcgtggcgctttctcatagctcacgctgtaggtatctcagttcggtgtaggtcgttcgctccaagctgggctgtgtgcacgaaccccccgttcagcccgaccgctgcgccttatccggtaactatcgtcttgagtccaacccggtaagacacgacttatcgccactggcagcagccactggtaacaggattagcagagcgaggtatgtaggcggtgctacagagttcttgaagtggtggcctaactacggctacactagaaggacagtatttggtatctgcgctctgctgaagccagttaccttcggaaaaagagttggtagctcttgatccggcaaacaaaccaccgctggtagcggtggtttttttgtttgcaagcagcagattacgcgcagaaaaaaaggatctcaagaagatcctttgatcttttctacggggtctgacgctcagtggaacgaaaactcacgttaagggattttggtcatgagattatcaaaaaggatcttcacctagatccttttaaattaaaaatgaagttttaaatcaatctaaagtatatatgagtaaacttggtctgacagttaccaatgcttaatcagtgaggcacctatctcagcgatctgtctatttcgttcatccatagttgcctgactccccgtcgtgtagataactacgatacgggagggcttaccatctggccccagtgctgcaatgataccgcgagacccacgctcaccggctccagatttatcagcaataaaccagccagccggaagggccgagcgcagaagtggtcctgcaactttatccgcctccatccagtctattaattgttgccgggaagctagagtaagtagttcgccagttaatagtttgcgcaacgttgttgccattgctacaggcatcgtggtgtcacgctcgtcgtttggtatggcttcattcagctccggttcccaacgatcaaggcgagttacatgatcccccatgttgtgcaaaaaagcggttagctccttcggtcctccgatcgttgtcagaagtaagttggccgcagtgttatcactcatggttatggcagcactgcataattctcttactgtcatgccatccgtaagatgcttttctgtgactggtgagtactcaaccaagtcattctgagaatagtgtatgcggcgaccgagttgctcttgcccggcgtcaatacgggataataccgcgccacatagcagaactttaaaagtgctcatcattggaaaacgttcttcggggcgaaaactctcaaggatcttaccgctgttgagatccagttcgatgtaacccactcgtgcacccaactgatcttcagcatcttttactttcaccagcgtttctgggtgagcaaaaacaggaaggcaaaatgccgcaaaaaagggaataagggcgacacggaaatgttgaatactcatactcttcctttttcaatattattgaagcatttatcagggttattgtctcatgagcggatacatatttgaatgtatttagaaaaataaacaaataggggttccgcgcacatttccccgaaaagtgccacctgaacgaagcatctgtgcttcattttgtagaacaaaaatgcaacgcgagagcgctaatttttcaaacaaagaatctgagctgcatttttacagaacagaaatgcaacgcgaaagcgctattttaccaacgaagaatctgtgcttcatttttgtaaaacaaaaatgcaacgcgagagcgctaatttttcaaacaaagaatctgagctgcatttttacagaacagaaatgcaacgcgagagcgctattttaccaacaaagaatctatacttcttttttgttctacaaaaatgcatcccgagagcgctatttttctaacaaagcatcttagattactttttttctcctttgtgcgctctataatgcagtctcttgataactttttgcactgtaggtccgttaaggttagaagaaggctactttggtgtctattttctcttccataaaaaaagcctgactccacttcccgcgtttactgattactagcgaagctgcgggtgcattttttcaagataaaggcatccccgattatattctataccgatgtggattgcgcatactttgtgaacagaaagtgatagcgttgatgattcttcattggtcagaaaattatgaacggtttcttctattttgtctctatatactacgtataggaaatgtttacattttcgtattgttttcgattcactctatgaatagttcttactacaatttttttgtctaaagagtaatactagagataaacataaaaaatgtagaggtcgagtttagatgcaagttcaaggagcgaaaggtggatgggtaggttatatagggatatagcacagagatatatagcaaagagatacttttgagcaatgtttgtggaagcggtattcgcaatattttagtagctcgttacagtccggtgcgtttttggttttttgaaagtgcgtcttcagagcgcttttggttttcaaaagcgctctgaagttcctatactttctagagaataggaacttcggaataggaacttcaaagcgtttccgaaaacgagcgcttccgaaaatgcaacgcgagctgcgcacatacagctcactgttcacgtcgcacctatatctgcgtgttgcctgtatatatatatacatgagaagaacggcatagtgcgtgtttatgcttaaatgcgtacttatatgcgtctatttatgtaggatgaaaggtagtctagtacctcctgtgatattatcccattccatgcggggtatcgtatgcttccttcagcactaccctttagctgttctatatgctgccactcctcaattggattagtctcatccttcaatgctatcatttcctttgatattggatcatctaagaaaccattattatcatgacattaacctataaaaataggcgtatcacgaggccctttcgtca

SEQ ID NO: 236 - DNA, 4905 bp, Artificial Sequence
  pMOD-URA3r2 plasmid
tcgcgcgtttcggtgatgacggtgaaaacctctgacacatgcagctcccggagacggtcacagcttgtctgtaagcggatgccgggagcagacaagcccgtcagggcgcgtcagcgggtgttggcgggtgtcggggctggcttaactatgcggcatcagagcagattgtactgagagtgcaccatatgcggtgtgaaataccgcacagatgcgtaaggagaaaataccgcatcaggcgccattcgccattcaggctgcgcaactgttgggaagggcgatcggtgcgggcctcttcgctattacgacagctgtctcttatacacatctcaaccatcatcgatgaattttctcgggtgttctcgcatattggctcgaattcgcattgcggattacgtattctaatgttcaggtgctggaagaagagctgcttaaccgccgcgcccagggtgaagatccacgctactttaccctgcgtcgtctggatttcggcggctgtcgtctttcgctggcaacgccggttgatgaagcctgggacggtccgctctccttaaacggtaaacgtatcgccacctcttatcctcacctgctcaagcgttatctcgaccagaaaggcatctcttttaaatcctgcttactgaacggttctgttgaagtcgccccgcgtgccggactggcggatgcgatttgcgatctggtttccaccggtgccacgctggaagctaacggcctgcgcgaagtcgaagttatctatcgctcgaaagcctgcctgattcaacgcgatggcgaaatggaagaatccaaacagcaactgatcgacaaactgctgacccgtattcagggtgtgatccaggcgcgcgaatcaaaatacatcatgatgcacgcaccgaccgaacgtctggatgaagtcatggtacctactgagagtgcaccataccacagcttttcaattcaattcatcattttttttttattcttttttttgatttcggtttctttgaaatttttttgattcggtaatctccgaacagaaggaagaacgaaggaaggagcacagacttagattggtatatatacgcatatgtagtgttgaagaaacatgaaattgcccagtattcttaacccaactgcacagaacaaaaacctgcaggaaacgaagataaatcatgtcgaaagctacatataaggaacgtgctgctactcatcctagtcctgttgctgccaagctatttaatatcatgcacgaaaagcaaacaaacttgtgtgcttcattggatgttcgtaccaccaaggaattactggagttagttgaagcattaggtcccaaaatttgtttactaaaaacacatgtggatatcttgactgatttttccatggagggcacagttaagccgctaaaggcattatccgccaagtacaattttttactcttcgaagacagaaaatttgctgacattggtaatacagtcaaattgcagtactctgcgggtgtatacagaatagcagaatgggcagacattacgaatgcacacggtgtggtgggcccaggtattgttagcggtttgaagcaggcggcagaagaagtaacaaaggaacctagaggccttttgatgttagcagaattgtcatgcaagggctccctatctactggagaatatactaagggtactgttgacattgcgaagagcgacaaagattttgttatcggctttattgctcaaagagacatgggtggaagagatgaaggttacgattggttgattatgacacccggtgtgggtttagatgacaagggagacgcattgggtcaacagtatagaaccgtggatgatgtggtctctacaggatctgacattattattgttggaagaggactatttgcaaagggaagggatgctaaggtagagggtgaacgttacagaaaagcaggctgggaagcatatttgagaagatgcggccagcaaaactaaaaaactgtattataagtaaatgcatgtatactaaactcacaaattagagcttcaatttaattatatcagttattaccctatgcggtgtgaaataccgcacagatgcgtaaggagaaaataccgcatcaggaaattgtaaacgttaatattttgttaaaattcgcgttaaatttttgttaaatcagctcattttttaaccaataggccgaaatcggcaaaatctctagagtgctggaagaagagctgcttaaccgccgcgcccagggtgaagatccacgctactttaccctgcgtcgtctggatttcggcggctgtcgtctttcgctggcaacgccggttgatgaagcctgggacggtccgctctccttaaacggtaaacgtatcgccacctcttatcctcacctgctcaagcgttatctcgaccagaaaggcatctcttttaaatcctgcttactgaacggttctgttgaagtcgccccgcgtgccggactggcggatgcgatttgcgatctggtttccaccggtgccacgctggaagctaacggcctgcgcgaagtcgaagttatctatcgctcgaaagcctgcctgattcaacgcgatggcgaaatggaagaatccaaacagcaactgatcgacaaactgctgacccgtattcagggtgtgatccaggcgcgcgaatcaaaatacatcatgatgcacgcaccgaccgaacgtctggatgaagtcatccagtgatgatacaacgagttagccaaggtgcggccgcgaattcgagctcggtacccggggatcctctagagtcgacctgcaggcatgcaagcttgccaacgactacgcactagccaacaagagcttcagggttgagatgtgtataagagacagctgtcttaatgaatcggccaacgcgcggggagaggcggtttgcgtattgggcgctcttccgcttcctcgctcactgactcgctgcgctcggtcgttcggctgcggcgagcggtatcagctcactcaaaggcggtaatacggttatccacagaatcaggggataacgcaggaaagaacatgtgagcaaaaggccagcaaaaggccaggaaccgtaaaaaggccgcgttgctggcgtttttccataggctccgcccccctgacgagcatcacaaaaatcgacgctcaagtcagaggtggcgaaacccgacaggactataaagataccaggcgtttccccctggaagctccctcgtgcgctctcctgttccgaccctgccgcttaccggatacctgtccgcctttctcccttcgggaagcgtggcgctttctcatagctcacgctgtaggtatctcagttcggtgtaggtcgttcgctccaagctgggctgtgtgcacgaaccccccgttcagcccgaccgctgcgccttatccggtaactatcgtcttgagtccaacccggtaagacacgacttatcgccactggcagcagccactggtaacaggattagcagagcgaggtatgtaggcggtgctacagagttcttgaagtggtggcctaactacggctacactagaaggacagtatttggtatctgcgctctgctgaagccagttaccttcggaaaaagagttggtagctcttgatccggcaaacaaaccaccgctggtagcggtggtttttttgtttgcaagcagcagattacgcgcagaaaaaaaggatctcaagaagatcctttgatcttttctacggggtctgacgctcagtggaacgaaaactcacgttaagggattttggtcatgagattatcaaaaaggatcttcacctagatccttttaaattaaaaatgaagttttaaatcaatctaaagtatatatgagtaaacttggtctgacagttaccaatgcttaatcagtgaggcacctatctcagcgatctgtctatttcgttcatccatagttgcctgactccccgtcgtgtagataactacgatacgggagggcttaccatctggccccagtgctgcaatgataccgcgagacccacgctcaccggctccagatttatcagcaataaaccagccagccggaagggccgagcgcagaagtggtcctgcaactttatccgcctccatccagtctattaattgttgccgggaagctagagtaagtagttcgccagttaatagtttgcgcaacgttgttgccattgctacaggcatcgtggtgtcacgctcgtcgtttggtatggcttcattcagctccggttcccaacgatcaaggcgagttacatgatcccccatgttgtgcaaaaaagcggttagctccttcggtcctccgatcgttgtcagaagtaagttggccgcagtgttatcactcatggttatggcagcactgcataattctcttactgtcatgccatccgtaagatgcttttctgtgactggtgagtactcaaccaagtcattctgagaatagtgtatgcggcgaccgagttgctcttgcccggcgtcaatacgggataataccgcgccacatagcagaactttaaaagtgctcatcattggaaaacgttcttcggggcgaaaactctcaaggatcttaccgctgttgagatccagttcgatgtaacccactcgtgcacccaactgatcttcagcatcttttactttcaccagcgtttctgggtgagcaaaaacaggaaggcaaaatgccgcaaaaaagggaataagggcgacacggaaatgttgaatactcatactcttcctttttcaatattattgaagcatttatcagggttattgtctcatgagcggatacatatttgaatgtatttagaaaaataaacaaataggggttccgcgcacatttccccgaaaagtgccacctgacgtctaagaaaccattattatcatgacattaacctataaaaataggcgtatcacgaggccctttcgtc

SEQ ID NO: 237 - DNA, 56 bp, Artificial Sequence
  T-TEF1t(NotI) primer
ctaaagctatgtgcggccgcgtttaacttgatactactagattttttctcttcatt

SEQ ID NO: 238 - DNA, 52 bp, Artificial Sequence
  B-TEF1t(NotI) primer
ttacttatatggcggccgcgaacagagaaactaaatccacattaattgagag

SEQ ID NO: 239 - DNA, 60 bp, Artificial Sequence
  T-DSmo(RPS5p) primer
gagactagaaataaccgaccattccaaaatgaccgataaaaagactttgaaggatttgag

SEQ ID NO: 240 - DNA, 725 bp, Artificial Sequence
  UAS(PGK1)-FBA1p promoter
aattaccgtcgctcgtgatttgtttgcaaaaagaacaaaactgaaaaaacccagacacgctcgacttcctgtcttcctattgattgcagcttccaatttcgtcacacaacaaggtcctgtcgacgcctacttggcttcacatacgttgcatacgtcgatatagataataatgataatgacagcaggattatcgtaatacgtaatagttgaaaatctcaaaaatgtgtgggtcattacgtaaataatgataggaatgggattcttctatttttcctttttccattctagcagccgtcgggaaaacgtggcatcctctctttcgggctcaattggagtcacgctgccgtgagcatcctctctttccatatctaacaactgagcacgtaaccaatggaaaagcatgagcttagcgttgctccaaaaaagtattggatggttaataccatttgtctgttctcttctgactttgactcctcaaaaaaaaaaaatctacaatcaacagatcgcttcaattacgccctcacaaaaacttttttccttcttcttcgcccacgttaaattttatccctcatgttgtctaacggatttctgcacttgatttattataaaaagacaaagacataatacttctctatcaatttcagttattgttcttccttgcgttattcttctgttcttctttttcttttgtcatatataaccataaccaagtaatacatattcaa

SEQ ID NO: 241 - DNA, 8366 bp, Artificial Sequence
  pRS316-UAS(PGK1)-FBA1p-GUS plasmid
tcgcgcgtttcggtgatgacggtgaaaacctctgacacatgcagctcccggagacggtcacagcttgtctgtaagcggatgccgggagcagacaagcccgtcagggcgcgtcagcgggtgttggcgggtgtcggggctggcttaactatgcggcatcagagcagattgtactgagagtgcaccacgcttttcaattcaattcatcattttttttttattcttttttttgatttcggtttctttgaaatttttttgattcggtaatctccgaacagaaggaagaacgaaggaaggagcacagacttagattggtatatatacgcatatgtagtgttgaagaaacatgaaattgcccagtattcttaacccaactgcacagaacaaaaacctgcaggaaacgaagataaatcatgtcgaaagctacatataaggaacgtgctgctactcatcctagtcctgttgctgccaagctatttaatatcatgcacgaaaagcaaacaaacttgtgtgcttcattggatgttcgtaccaccaaggaattactggagttagttgaagcattaggtcccaaaatttgtttactaaaaacacatgtggatatcttgactgatttttccatggagggcacagttaagccgctaaaggcattatccgccaagtacaattttttactcttcgaagacagaaaatttgctgacattggtaatacagtcaaattgcagtactctgcgggtgtatacagaatagcagaatgggcagacattacgaatgcacacggtgtggtgggcccaggtattgttagcggtttgaagcaggcggcagaagaagtaacaaaggaacctagaggccttttgatgttagcagaattgtcatgcaagggctccctatctactggagaatatactaagggtactgttgacattgcgaagagcgacaaagattttgttatcggctttattgctcaaagagacatgggtggaagagatgaaggttacgattggttgattatgacacccggtgtgggtttagatgacaagggagacgcattgggtcaacagtatagaaccgtggatgatgtggtctctacaggatctgacattattattgttggaagaggactatttgcaaagggaagggatgctaaggtagagggtgaacgttacagaaaagcaggctgggaagcatatttgagaagatgcggccagcaaaactaaaaaactgtattataagtaaatgcatgtatactaaactcacaaattagagcttcaatttaattatatcagttattaccctgcggtgtgaaataccgcacagatgcgtaaggagaaaataccgcatcaggaaattgtaaacgttaatattttgttaaaattcgcgttaaatttttgttaaatcagctcattttttaaccaataggccgaaatcggcaaaatcccttataaatcaaaagaatagaccgagatagggttgagtgttgttccagtttggaacaagagtccactattaaagaacgtggactccaacgtcaaagggcgaaaaaccgtctatcagggcgatggcccactacgtgaaccatcaccctaatcaagttttttggggtcgaggtgccgtaaagcactaaatcggaaccctaaagggagcccccgatttagagcttgacggggaaagccggcgaacgtggcgagaaaggaagggaagaaagcgaaaggagcgggcgctagggcgctggcaagtgtagcggtcacgctgcgcgtaaccaccacacccgccgcgcttaatgcgccgctacagggcgcgtcgcgccattcgccattcaggctgcgcaactgttgggaagggcgatcggtgcgggcctcttcgctattacgccagctggcgaaggggggatgtgctgcaaggcgattaagttgggtaacgccagggttttcccagtcacgacgttgtaaaacgacggccagtgaattgtaatacgactcactatagggcgaattggagctccaccgcggtggtttaacgtatagacttctaatatatttctccatacttggtattttttattcactttttttatacatatttggtttttttatacaatatcaaaaatcaataataattaatttaataacaagaatatgttgctgtgatgactcttaatatacaattgggaagcattcaaggattggtacgacgtttgctttctgataattaaacgcttggcgtttaatcttttttgccgattaataatattattattaccctcttatttattagcattgtcttccgtactaaaaggagtagggaaaaaggcgaagtagagtgacacgtccattacccagcgcttcataagaatccatcaggtatattaaattgtgatgggagaacaaaacaaattgtactatgatgtcgagaaattggtgaattctttgcaggaaagttttgacctggattgcgcgcaaagtgtatcacttttcaccagtaaatcaaggagcaatgaggcttggttggaagagctagagaataaattcaagttaaaagatgatgttgaacttgatgatgtggaaaatttaagagccgaaattgacatgaagttaaatatgttggaggataaagtaagctactatgaaagactttacaaagaactcgaagagttccagaatgaaataaaaattaaaacagttgtgaataacagaagacaatcgcgaactccaaaatgagctatcaaaaacgatagatcgattaggatgactttgaaatgactccgcagtggactggccgttaatttcaagcgtgagtaaaatagtgcatgacaaaagatgagctaggcttttgtaaaaatatcttacgttgtaaaattttagaaatcattatttccttcatatcattttgtcattgaccttcagaagaaaagagccgaccaataatataaataaataaataaaaataatattccattatttctaaacagattcaatactcattaaaaaactatatcaattaatttgaattaacgcggccgctctagttaattaatcattgtttgcctccctgctgcggtttttcaccgaagttcatgccagtccagcgtttttgcagcagaaaagccgccgacttcggtttgcggtcgcgagtgaagatccctttcttgttaccgccaacgcgcaatatgccttgcgaggtcgcaaaatcggcgaaattccatacctgttcaccgacgacggcgctgacgcgatcaaagacgcggtgatacatatccagccatgcacactgatactcttcactccacatgtcggtgtacattgagtgcagcccggctaacgtatccacgccgtattcggtgatgataatcggctgatgcagtttctcctgccaggccagaagttctttttccagtaccttctctgccgtttccaaatcgccgctttggacataccatccgtaataacggttcaggcacagcacatcaaagagatcgctgatggtatcggtgtgagcgtcgcagaacattacattgacgcaggtgatcggacgcgtcgggtcgagtttacgcgttgcttccgccagtggcgcgaaatattcccgtgcaccttgcggacgggtatccggttcgttggcaatactccacatcaccacgcttgggtggtttttgtcacgcgctatcagctctttaatcgcctgtaagtgcgcttgctgagtttccccgttgactgcctcttcgctgtacagttctttcggcttgttgcccgcttcgaaaccaatgcctaaagagaggttaaagccgacagcagcagtttcatcaatcaccacgatgccatgttcatctgcccagtcgagcatctcttcagcgtaagggtaatgcgaggtacggtaggagttggccccaatccagtccattaatgcgtggtcgtgcaccatcagcacgttatcgaatcctttgccacgcaagtccgcatcttcatgacgaccaaagccagtaaagtagaacggtttgtggttaatcaggaactgttcgcccttcactgccactgaccggatgccgacgcgaagcgggtagatatcacactctgtctggcttttggctgtgacgcacagttcatagagataaccttcacccggttgccagaggtgcggattcaccacttgcaaagtcccgctagtgccttgtccagttgcaaccacctgttgatccgcatcacgcagttcaacgctgacatcaccattggccaccacctgccagtcaacagacgcgtggttacagtcttgcgcgacatgcgtcaccacggtgatatcgtccacccaggtgttcggcgtggtgtagagcattacgctgcgatggattccggcatagttaaagaaatcatggaagtaagactgctttttcttgccgttttcgtcggtaatcaccattcccggcgggatagtctgccagttcagttcgttgttcacacaaacggtgatacgtacacttttcccggcaataacatacggcgtgacatcggcttcaaatggagtatagccgccctgatgctccatcacttcctgattattgacccacactttgccgtaatgagtgaccgcatcgaaacgcagcacgatacgctggcctgcccaacctttcggtataaagacttcgcgctgataccagacgttgcccgcataattacgaatatctgcatcggcgaactgatcgttaaaactgcctggcacagcaattgcccggctttcttgtaacgcgctttcccaccaacgctgatcaattccacagttttcgcgatccagactgaatgcccacaggccgtcgagttttttgatttcacgggttggggtttctacaggacgtaccatactagtttgaatatgtattacttggttatggttatatatgacaaaagaaaaagaagaacagaagaataacgcaaggaagaacaataactgaaattgatagagaagtattatgtctttgtctttttataataaatcaagtgcagaaatccgttagacaacatgagggataaaatttaacgtgggcgaagaagaaggaaaaaagtttttgtgagggcgtaattgaagcgatctgttgattgtagattttttttttttgaggagtcaaagtcagaagagaacagacaaatggtattaaccatccaatacttttttggagcaacgctaagctcatgcttttccattggttacgtgctcagttgttagatatggaaagagaggatgctcacggcagcgtgactccaattgagcccgaaagagaggatgccacgttttcccgacggctgctagaatggaaaaaggaaaaatagaagaatcccattcctatcattatttacgtaatgacccacacatttttgagattttcaactattacgtattacgataatcctgctgtcattatcattattatctatatcgacgtatgcaacgtatgtgaagccaagtaggcgtcgacaggaccttgttgtgtgacgaaattggaagctgcaatcaataggaagacaggaagtcgagcgtgtctgggttttttcagttttgttctttttgcaaacaaatcacgagcgacggtaattggtacccagcttttgttccctttagtgagggttaattccgagcttggcgtaatcatggtcatagctgtttcctgtgtgaaattgttatccgctcacaattccacacaacataggagccggaagcataaagtgtaaagcctggggtgcctaatgagtgaggtaactcacattaattgcgttgcgctcactgcccgctttccagtcgggaaacctgtcgtgccagctgcattaatgaatcggccaacgcgcggggagaggcggtttgcgtattgggcgctcttccgcttcctcgctcactgactcgctgcgctcggtcgttcggctgcggcgagcggtatcagctcactcaaaggcggtaatacggttatccacagaatcaggggataacgcaggaaagaacatgtgagcaaaaggccagcaaaaggccaggaaccgtaaaaaggccgcgttgctggcgtttttccataggctcggcccccctgacgagcatcacaaaaatcgacgctcaagtcagaggtggcgaaacccgacaggactataaagataccaggcgttcccccctggaagctccctcgtgcgctctcctgttccgaccctgccgcttaccggatacctgtccgcctttctcccttcgggaagcgtggcgctttctcaatgctcacgctgtaggtatctcagttcggtgtaggtcgttcgctccaagctgggctgtgtgcacgaaccccccgttcagcccgaccgctgcgccttatccggtaactatcgtcttgagtccaacccggtaagacacgacttatcgccactggcagcagccactggtaacaggattagcagagcgaggtatgtaggcggtgctacagagttcttgaagtggtggcctaactacggctacactagaaggacagtatttggtatctgcgctctgctgaagccagttaccttcggaaaaagagttggtagctcttgatccggcaaacaaaccaccgctggtagcggtggtttttttgtttgcaagcagcagattacgcgcagaaaaaaaggatctcaagaagatcctttgatcttttctacggggtctgacgctcagtggaacgaaaactcacgttaagggattttggtcatgagattatcaaaaaggatcttcacctagatccttttaaattaaaaatgaagttttaaatcaatctaaagtatatatgagtaaacttggtctgacagttaccaatgcttaatcagtgaggcacctatctcagcgatctgtctatttcgttcatccatagttgcctgactgcccgtcgtgtagataactacgatacgggagggcttaccatctggccccagtgctgcaatgataccgcgagacccacgctcaccggctccagatttatcagcaataaaccagccagccggaagggccgagcgcagaagtggtcctgcaactttatccgcctccatccagtctattaattgttgccgggaagctagagtaagtagttcgccagttaatagtttgcgcaacgttgttgccattgctacaggcatcgtggtgtcacgctcgtcgtttggtatggcttcattcagctccggttcccaacgatcaaggcgagttacatgatcccccatgttgtgaaaaaaagcggttagctccttcggtcctccgatcgttgtcagaagtaagttggccgcagtgttatcactcatggttatggcagcactgcataattctcttactgtcatgccatccgtaagatgcttttctgtgactggtgagtactcaaccaagtcattctgagaatagtgtatgcggcgaccgagttgctcttgcccggcgtcaatacgggataataccgcgccacatagcagaactttaaaagtgctcatcattggaaaacgttcttcggggcgaaaactctcaaggatcttaccgctgttgagatccagttcgatgtaacccactcgtgcacccaactgatcttcagcatcttttactttcaccagcgtttctgggtgagcaaaaacaggaaggcaaaatgccgcaaaaaagggaataagggcgacacggaaatgttgaatactcatactcttcctttttcaatattattgaagcatttatcagggttattgtctcatgagcggatacatatttgaatgtatttagaaaaataaacaaataggggttccgcgcacatttccccgaaaagtgccacctgggtccttttcatcacgtgctataaaaataattataatttaaattttttaatataaatatataaattaaaaatagaaagtaaaaaaagaaattaaagaaaaaatagtttttgttttccgaagatgtaaaagactctagggggatcgccaacaaatactaccttttatcttgctcttcctgctctcaggtattaatgccgaattgtttcatcttgtctgtgtagaagaccacacacgaaaatcctgtgattttacattttacttatcgttaatcgaatgtatatctatttaatctgcttttcttgtctaataaatatatatgtaaagtacgctttttgttgaaattttttaaacctttgtttatttttttttcttcattccgtaactcttctaccttctttatttactttctaaaatccaaatacaaaacataaaaataaataaacacagagtaaattcccaaattattccatcattaaaagatacgaggcgcgtgtaagttacaggcaagcgatccgtcctaagaaaccattattatcatgacattaacctataaaaataggcgtatcacgaggccctttcgtc

SEQ ID NO: 242 - DNA, 49 bp, Artificial Sequence
  T-U/PGK1 (XhoApa)  primer
actacagatctcgaggggcccaattaccgtcgctcgtgatttgtttgca

SEQ ID NO: 243 - DNA, 49 bp, Artificial Sequence
  B-FBA1(SpeI) primer
gtatcaaatactagtttgaatatgtattacttggttatggttatatatg

SEQ ID NO: 244 - DNA, 7639 bp, Artificial Sequence
  pMOD-URA3r2-UAS(PGK1)-FBA1p-ilvD(y)-TEF1t plasmid
tcgcgcgtttcggtgatgacggtgaaaacctctgacacatgcagctcccggagacggtcacagcttgtctgtaagcggatgccgggagcagacaagcccgtcagggcgcgtcagcgggtgttggcgggtgtcggggctggcttaactatgcggcatcagagcagattgtactgagagtgcaccatatgcggtgtgaaataccgcacagatgcgtaaggagaaaataccgcatcaggcgccattcgccattcaggctgcgcaactgttgggaagggcgatcggtgcgggcctcttcgctattacgacagctgtctcttatacacatctcaaccatcatcgatgaattttctcgggtgttctcgcatattggctcgaattcgcattgcggattacgtattctaatgttcaggtgctggaagaagagctgcttaaccgccgcgcccagggtgaagatccacgctactttaccctgcgtcgtctggatttcggcggctgtcgtctttcgctggcaacgccggttgatgaagcctgggacggtccgctctccttaaacggtaaacgtatcgccacctcttatcctcacctgctcaagcgttatctcgaccagaaaggcatctcttttaaatcctgcttactgaacggttctgttgaagtcgccccgcgtgccggactggcggatgcgatttgcgatctggtttccaccggtgccacgctggaagctaacggcctgcgcgaagtcgaagttatctatcgctcgaaagcctgcctgattcaacgcgatggcgaaatggaagaatccaaacagcaactgatcgacaaactgctgacccgtattcagggtgtgatccaggcgcgcgaatcaaaatacatcatgatgcacgcaccgaccgaacgtctggatgaagtcatggtacctactgagagtgcaccataccacagcttttcaattcaattcatcattttttttttattcttttttttgatttcggtttctttgaaatttttttgattcggtaatctccgaacagaaggaagaacgaaggaaggagcacagacttagattggtatatatacgcatatgtagtgttgaagaaacatgaaattgcccagtattcttaacccaactgcacagaacaaaaacctgcaggaaacgaagataaatcatgtcgaaagctacatataaggaacgtgctgctactcatcctagtcctgttgctgccaagctatttaatatcatgcacgaaaagcaaacaaacttgtgtgcttcattggatgttcgtaccaccaaggaattactggagttagttgaagcattaggtcccaaaatttgtttactaaaaacacatgtggatatcttgactgatttttccatggagggcacagttaagccgctaaaggcattatccgccaagtacaattttttactcttcgaagacagaaaatttgctgacattggtaatacagtcaaattgcagtactctgcgggtgtatacagaatagcagaatgggcagacattacgaatgcacacggtgtggtgggcccaggtattgttagcggtttgaagcaggcggcagaagaagtaacaaaggaacctagaggccttttgatgttagcagaattgtcatgcaagggctccctatctactggagaatatactaagggtactgttgacattgcgaagagcgacaaagattttgttatcggctttattgctcaaagagacatgggtggaagagatgaaggttacgattggttgattatgacacccggtgtgggtttagatgacaagggagacgcattgggtcaacagtatagaaccgtggatgatgtggtctctacaggatctgacattattattgttggaagaggactatttgcaaagggaagggatgctaaggtagagggtgaacgttacagaaaagcaggctgggaagcatatttgagaagatgcggccagcaaaactaaaaaactgtattataagtaaatgcatgtatactaaactcacaaattagagcttcaatttaattatatcagttattaccctatgcggtgtgaaataccgcacagatgcgtaaggagaaaataccgcatcaggaaattgtaaacgttaatattttgttaaaattcgcgttaaatttttgttaaatcagctcattttttaaccaataggccgaaatcggcaaaatctctagagtgctggaagaagagctgcttaaccgccgcgcccagggtgaagatccacgctactttaccctgcgtcgtctggatttcggcggctgtcgtctttcgctggcaacgccggttgatgaagcctgggacggtccgctctccttaaacggtaaacgtatcgccacctcttatcctcacctgctcaagcgttatctcgaccagaaaggcatctcttttaaatcctgcttactgaacggttctgttgaagtcgccccgcgtgccggactggcggatgcgatttgcgatctggtttccaccggtgccacgctggaagctaacggcctgcgcgaagtcgaagttatctatcgctcgaaagcctgcctgattcaacgcgatggcgaaatggaagaatccaaacagcaactgatcgacaaactgctgacccgtattcagggtgtgatccaggcgcgcgaatcaaaatacatcatgatgcacgcaccgaccgaacgtctggatgaagtcatccagtgatgatacaacgagttagccaaggtgcggccgccgaacagagaaactaaatccacattaattgagagttctatctattagaaaatgcaaactccaactaaatgggaaaacagataacctcttttatttttttttaatgtttgatattcgagtctttttcttttgttaggtttatattcatcatttcaatgaataaaagaagcttcttattttggttgcaaagaatgaaaaaaaaggattttttcatacttctaaagcttcaattataaccaaaaattttataaatgaagagaaaaaatctagtagtatcaagttaaacgcggccgcttaaccacagcaaccaggacaacattttttgccagtttcttcaggcttccaaaagtctgttacggctcccctagaagcagacgaaacgatgtgagcatatttaccaaggataccgcgtgaatagagcggtggcaattcaatggtctcttgacgatgttttaactcttcatcggagatatcaaagtgtaattccttagtgtcttggtcaatagtgactatgtctcctgtttgcaggtaggcgattggaccgccatcttgtgcttcaggagcgatatgacccacgacaagaccataagtaccacctgagaagcggccatctgtcagaagggcaactttttcaccttgccctttaccaacaatcattgatgaaagggaaagcatttcaggcataccaggaccgccctttggtcctacaaaacgtacgacaacaacatcaccatcaacaatatcatcattcaagacagcttcaatggcttcttcttcagaattaaagaccttagcaggaccgacatgacgacgcacttttacaccagaaactttggcaacggcaccgtctggagccaagttaccatggagaataatgagcggaccatcttcacgtttaggattttcaagcggcataataaccttttgaccaggtgttaaatcatcaaaagccttcaaattttcagcgactgttttgccagtacaagtgatacggtcaccatgaaggaagccatttttaaggagatatttcataactgctggtacccctccgaccttgtaaaggtcttggaatacatattgaccagaaggtttcaaatcagccaaatgaggaactttttcttggaaagtattgaaatcatcaagtgtcaattccacattagcagcatgggcaatagctaagaggtgaagggttgagttggttgaacctcccagagccatagttacagtaatagcatcttcaaaagcttcacgcgttaaaatgtcagaaggttttaagcccatttcgagcattttgacaacagcgcgaccagcttcttcaatatctgctttcttttctgcggattcagccgggtgagaagatgaacccggaaggctaagtcccaaaacttcaatagctgtcgccattgtgttagcagtatacataccaccgcagcctccaggaccgggacaagcattacattccaaagctttaacttcttctttggtcatatcgccgtggttccaatggccgacaccttcaaagacagagactaaatcgatatctttgccgtctaaattaccaggtgcaattgttccgccgtaagcaaaaatggctgggatatccatgttagccatagcgataacagaaccgggcatgtttttatcacaaccgccaatggctacaaaagcatccgcattatgacctcccatggctgcttcaatagaatctgcaataatatcacgagatgtcaaggagaaacgcattccttgggttcccatggcgattccatcagaaaccgtgattgttccgaactgaactggccaagcaccagcttccttaacaccgactttggctagtttaccaaagtcatgtaagtggatattacaaggtgtgttttcagcccaagttgaaatgacaccgacgataggtttttcaaagtcttcatcttgcataccagttgcacgcaacatagcacgattaggtgatttaaccattgaatcgtaaacagaactacgatttcttaagtctttaagagtttttttgtcagtcatactagtttgaatatgtattacttggttatggttatatatgacaaaagaaaaagaagaacagaagaataacgcaaggaagaacaataactgaaattgatagagaagtattatgtctttgtctttttataataaatcaagtgcagaaatccgttagacaacatgagggataaaatttaacgtgggcgaagaagaaggaaaaaagtttttgtgagggcgtaattgaagcgatctgttgattgtagattttttttttttgaggagtcaaagtcagaagagaacagacaaatggtattaaccatccaatacttttttggagcaacgctaagctcatgcttttccattggttacgtgctcagttgttagatatggaaagagaggatgctcacggcagcgtgactccaattgagcccgaaagagaggatgccacgttttcccgacggctgctagaatggaaaaaggaaaaatagaagaatcccattcctatcattatttacgtaatgacccacacatttttgagattttcaactattacgtattacgataatcctgctgtcattatcattattatctatatcgacgtatgcaacgtatgtgaagccaagtaggcgtcgacaggaccttgttgtgtgacgaaattggaagctgcaatcaataggaagacaggaagtcgagcgtgtctgggttttttcagttttgttctttttgcaaacaaatcacgagcgacggtaattgggcccctcgacctgcaggcatgcaagcttgccaacgactacgcactagccaacaagagcttcagggttgagatgtgtataagagacagctgtcttaatgaatcggccaacgcgcggggagaggcggtttgcgtattgggcgctcttccgcttcctcgctcactgactcgctgcgctcggtcgttcggctgcggcgagcggtatcagctcactcaaaggcggtaatacggttatccacagaatcaggggataacgcaggaaagaacatgtgagcaaaaggccagcaaaaggccaggaaccgtaaaaaggccgcgttgctggcgtttttccataggctccgcccccctgacgagcatcacaaaaatcgacgctcaagtcagaggtggcgaaacccgacaggactataaagataccaggcgtttccccctggaagctccctcgtgcgctctcctgttccgaccctgccgcttaccggatacctgtccgcctttctcccttcgggaagcgtggcgctttctcatagctcacgctgtaggtatctcagttcggtgtaggtcgttcgctccaagctgggctgtgtgcacgaaccccccgttcagcccgaccgctgcgccttatccggtaactatcgtcttgagtccaacccggtaagacacgacttatcgccactggcagcagccactggtaacaggattagcagagcgaggtatgtaggcggtgctacagagttcttgaagtggtggcctaactacggctacactagaaggacagtatttggtatctgcgctctgctgaagccagttaccttcggaaaaagagttggtagctcttgatccggcaaacaaaccaccgctggtagcggtggtttttttgtttgcaagcagcagattacgcgcagaaaaaaaggatctcaagaagatcctttgatcttttctacggggtctgacgctcagtggaacgaaaactcacgttaagggattttggtcatgagattatcaaaaaggatcttcacctagatccttttaaattaaaaatgaagttttaaatcaatctaaagtatatatgagtaaacttggtctgacagttaccaatgcttaatcagtgaggcacctatctcagcgatctgtctatttcgttcatccatagttgcctgactccccgtcgtgtagataactacgatacgggagggcttaccatctggccccagtgctgcaatgataccgcgagacccacgctcaccggctccagatttatcagcaataaaccagccagccggaagggccgagcgcagaagtggtcctgcaactttatccgcctccatccagtctattaattgttgccgggaagctagagtaagtagttcgccagttaatagtttgcgcaacgttgttgccattgctacaggcatcgtggtgtcacgctcgtcgtttggtatggcttcattcagctccggttcccaacgatcaaggcgagttacatgatcccccatgttgtgcaaaaaagcggttagctccttcggtcctccgatcgttgtcagaagtaagttggccgcagtgttatcactcatggttatggcagcactgcataattctcttactgtcatgccatccgtaagatgcttttctgtgactggtgagtactcaaccaagtcattctgagaatagtgtatgcggcgaccgagttgctcttgcccggcgtcaatacgggataataccgcgccacatagcagaactttaaaagtgctcatcattggaaaacgttcttcggggcgaaaactctcaaggatcttaccgctgttgagatccagttcgatgtaacccactcgtgcacccaactgatcttcagcatcttttactttcaccagcgtttctgggtgagcaaaaacaggaaggcaaaatgccgcaaaaaagggaataagggcgacacggaaatgttgaatactcatactcttcctttttcaatattattgaagcatttatcagggttattgtctcatgagcggatacatatttgaatgtatttagaaaaataaacaaataggggttccgcgcacatttccccgaaaagtgccacctgacgtctaagaaaccattattatcatgacattaacctataaaaataggcgtatcacgaggccctttcgtc

SEQ ID NO: 245 - DNA, 77 bp, Artificial Sequence
  T-FRA(Dsm) primer
tcctaacaactcagtggagagaaacaaagcgccaacgacactataagatgcccgtaattaccgtcgctcgtgatttg

SEQ ID NO: 246 - DNA, 81 bp, Artificial Sequence
  B-FRA(Dsm)  primer
aaagattcaatgccgtctcctttcgaaacttaataatagaacaatatcatcctttcgcattgcggattacgtattctaatg

SEQ ID NO: 247 - DNA, 21 bp, Artificial Sequence
  oBP602 primer
tgttcaaacccctaaccaacc

SEQ ID NO: 248 - DNA, 27 bp, Artificial Sequence
  DSm(o)50R primer
ctgtttggggacttaaccattgaatcg

SEQ ID NO: 249 - DNA, 32 bp, Artificial Sequence
  DSm(o)1F primer
atgaccgataaaaagactttgaaggatttgag

SEQ ID NO: 250 - DNA, 26 bp, Artificial Sequence
  DSm(o)688F primer
gccaggttccagttctcatcctgctg

SEQ ID NO: 251 - DNA, 29 bp, Artificial Sequence
  DSm(o)1352F primer
gttggtcctaaaggtggtccaggtatgcc

SEQ ID NO: 252 - DNA, 4242 bp, Artificial Sequence
  pLA59 plasmid
aaacgccagcaacgcggcctttttacggttcctggccttttgctggccttttgctcacatgttctttcctgcgttatcccctgattctgtggataaccgtattaccgcctttgagtgagctgataccgctcgccgcagccgaacgaccgagcgcagcgagtcagtgagcgaggaagcggaagagcgcccaatacgcaaaccgcctctccccgcgcgttggccgattcattaatgcagctggcacgacaggtttcccgactggaaagcgggcagtgagcgcaacgcaattaatgtgagttagctcactcattaggcaccccaggctttacactttatgcttccggctcgtatgttgtgtggaattgtgagcggataacaatttcacacaggaaacagctatgaccatgattacgccaagcttgcatgcctgcaggtcgactctagaggatccgcaatgcggatccgcattgcggattacgtattctaatgttcagtaccgttcgtataatgtatgctatacgaagttatgcagattgtactgagagtgcaccataccaccttttcaattcatcattttttttttattcttttttttgatttcggtttccttgaaatttttttgattcggtaatctccgaacagaaggaagaacgaaggaaggagcacagacttagattggtatatatacgcatatgtagtgttgaagaaacatgaaattgcccagtattcttaacccaactgcacagaacaaaaacctgcaggaaacgaagataaatcatgtcgaaagctacatataaggaacgtgctgctactcatcctagtcctgttgctgccaagctatttaatatcatgcacgaaaagcaaacaaacttgtgtgcttcattggatgttcgtaccaccaaggaattactggagttagttgaagcattaggtcccaaaatttgtttactaaaaacacatgtggatatcttgactgatttttccatggagggcacagttaagccgctaaaggcattatccgccaagtacaattttttactcttcgaagacagaaaatttgctgacattggtaatacagtcaaattgcagtactctgcgggtgtatacagaatagcagaatgggcagacattacgaatgcacacggtgtggtgggcccaggtattgttagcggtttgaagcaggcggcagaagaagtaacaaaggaacctagaggccttttgatgttagcagaattgtcatgcaagggctccctatctactggagaatatactaagggtactgttgacattgcgaagagcgacaaagattttgttatcggctttattgctcaaagagacatgggtggaagagatgaaggttacgattggttgattatgacacccggtgtgggtttagatgacaagggagacgcattgggtcaacagtatagaaccgtggatgatgtggtctctacaggatctgacattattattgttggaagaggactatttgcaaagggaagggatgctaaggtagagggtgaacgttacagaaaagcaggctgggaagcatatttgagaagatgcggccagcaaaactaaaaaactgtattataagtaaatgcatgtatactaaactcacaaattagagcttcaatttaattatatcagttattaccctatgcggtgtgaaataccgcacagatgcgtaaggagaaaataccgcatcaggaaattgtaaacgttaatattttgttaaaattcgcgttaaatttttgttaaatcagctcattttttaaccaataggccgaaatcggcaaaatcccttataaatcaaaagaatagaccgagatagggttgagtgttgttccagtttggaacaagagtccactattaaagaacgtggactccaacgtcaaagggcgaaaaaccgtctatcagggcgatggcccactacgtgaaccatcaccctaatcaagataacttcgtataatgtatgctatacgaacggtaccagtgatgatacaacgagttagccaaggtgaattcactggccgtcgttttacaacgtcgtgactgggaaaaccctggcgttacccaacttaatcgccttgcagcacatccccctttcgccagctggcgtaatagcgaagaggcccgcaccgatcgcccttcccaacagttgcgcagcctgaatggcgaatggcgcctgatgcggtattttctccttacgcatctgtgcggtatttcacaccgcatatggtgcactctcagtacaatctgctctgatgccgcatagttaagccagccccgacacccgccaacacccgctgacgcgccctgacgggcttgtctgctcccggcatccgcttacagacaagctgtgaccgtctccgggagctgcatgtgtcagaggttttcaccgtcatcaccgaaacgcgcgagacgaaagggcctcgtgatacgcctatttttataggttaatgtcatgataataatggtttcttagacgtcaggtggcacttttcggggaaatgtgcgcggaacccctatttgtttatttttctaaatacattcaaatatgtatccgctcatgagacaataaccctgataaatgcttcaataatattgaaaaaggaagagtatgagtattcaacatttccgtgtcgcccttattcccttttttgcggcattttgccttcctgtttttgctcacccagaaacgctggtgaaagtaaaagatgctgaagatcagttgggtgcacgagtgggttacatcgaactggatctcaacagcggtaagatccttgagagttttcgccccgaagaacgttttccaatgatgagcacttttaaagttctgctatgtggcgcggtattatcccgtattgacgccgggcaagagcaactcggtcgccgcatacactattctcagaatgacttggttgagtactcaccagtcacagaaaagcatcttacggatggcatgacagtaagagaattatgcagtgctgccataaccatgagtgataacactgcggccaacttacttctgacaacgatcggaggaccgaaggagctaaccgcttttttgcacaacatgggggatcatgtaactcgccttgatcgttgggaaccggagctgaatgaagccataccaaacgacgagcgtgacaccacgatgcctgtagcaatggcaacaacgttgcgcaaactattaactggcgaactacttactctagcttcccggcaacaattaatagactggatggaggcggataaagttgcaggaccacttctgcgctcggcccttccggctggctggtttattgctgataaatctggagccggtgagcgtgggtctcgcggtatcattgcagcactggggccagatggtaagccctcccgtatcgtagttatctacacgacggggagtcaggcaactatggatgaacgaaatagacagatcgctgagataggtgcctcactgattaagcattggtaactgtcagaccaagtttactcatatatactttagattgatttaaaacttcatttttaatttaaaaggatctaggtgaagatcctttttgataatctcatgaccaaaatcccttaacgtgagttttcgttccactgagcgtcagaccccgtagaaaagatcaaaggatcttcttgagatcctttttttctgcgcgtaatctgctgcttgcaaacaaaaaaaccaccgctaccagcggtggtttgtttgccggatcaagagctaccaactctttttccgaaggtaactggcttcagcagagcgcagataccaaatactgtccttctagtgtagccgtagttaggccaccacttcaagaactctgtagcaccgcctacatacctcgctctgctaatcctgttaccagtggctgctgccagtggcgataagtcgtgtcttaccgggttggactcaagacgatagttaccggataaggcgcagcggtcgggctgaacggggggttcgtgcacacagcccagcttggagcgaacgacctacaccgaactgagatacctacagcgtgagctatgagaaagcgccacgcttcccgaagggagaaaggcggacaggtatccggtaagcggcagggtcggaacaggagagcgcacgagggagcttccagggggaaacgcctggtatctttatagtcctgtcgggtttcgccacctctgacttgagcgtcgatttttgtgatgctcgtcaggggggcggagcctatggaa

SEQ ID NO: 253 - DNA, 85 bp, Artificial Sequence
  T-URA(gpd_60bp) primer
gtattttggtagattcaattctctttccctttccttttccttcgctccccttctttatcagcattgcggattacgtattctaatg

SEQ ID NO: 254 - DNA, 55 bp, Artificial Sequence
  B-URA(alsS) primer
cagtattgttattcatttcagatccaccttggctaactcgttgtatcatcactgg

SEQ ID NO: 255 - DNA, 7589 bp, Artificial Sequence
  pUC19-kan::pdc1::FBA-alsS::TRX1 plasmid
tatttgtatcgaggtgtctagtcttctattacactaatgcagtttcagggttttggaaaccacactgtttaaacagtgttccttaatcaaggatacctctttttttttccttggttccactaattcatcggttttttttttggaagacatcttttccaacgaaaagaatatacatatcgtttaagagaaattctccaaatttgtaaagaagcggacccagacttaaggccgcccgcaaattaaagccttcgagcgtcccaaaaccttctcaagcaaggttttcagtataatgttacatgcgtacacgcgtctgtacagaaaaaaaagaaaaatttgaaatataaataacgttcttaatactaacataactataaaaaaataaatagggacctagacttcaggttgtctaactccttccttttcggttagagcggatgtggggggagggcgtgaatgtaagcgtgacataactaattacatgattaattaactagagagctttcgttttcatgagttccccgaattctttcggaagcttgtcacttgctaaattaatgttatcactgtagtcaaccgggacatcgatgatgacaggaccttcagcgttcatgccttgacgcagaacatctgccagctggtctggtgattctacgcgcaagccagttgctccgaagctttccgcatatttcacgatatcgatatttccgaaatcgaccgcagatgtacggttatattttttcaattgctggaatgcaaccatgtcatatgtgctgtcgttccatacaatgtgtacaattggtgcttttagtcgaactgctgtctctaattccattgctgagaataagaaaccgccgtcaccagagacagaaaccactttttctcccggtttcaccaatgaagcgccgattgcccaaggaagcgcaacgccgagtgtttgcataccgttactgatcattaatgttaacggctcgtagctgcggaaataacgtgacatccaaatggcgtgcgaaccgatatcgcaagttactgtaacatgatcatcgactgcattacgcaactctttaacgatttcaagagggtgcgctctgtctgatttccaatctgcaggcacctgctcaccttcatgcatatattgttttaaatcagaaaggattttctgctcacgctctgcaaattccactttcacagcatcgtgttcgatatgattgatcgtggacggaatgtcaccgatcaattcaagatcaggctggtaagcatgatcaatgtcagcgataatctcgtctaaatggataattgtccggtctccattgatattccagaatttcggatcatattcaatcgggtcatagccgatcgtcagaacaacatctgcctgctctagcagtaaatcgccaggctggttgcggaacaaaccgatacggccaaaatattgatcctctaaatctctagaaagggtaccggcagcttgatatgtttcaacaaatggaagctgaacctttttcaaaagcttgcgaaccgctttaattgcttccggtcttccgcctttcatgccgaccaaaacgacaggaagttttgctgtttggatttttgctatggccgcactgattgcatcatctgctgcaggaccgagttttggcgctgcaacagcacgcacgtttttcgtatttgtgacttcattcacaacatcttgcggaaagctcacaaaagcggccccagcctgccctgctgacgctatcctaaatgcatttgtaacagcttccggtatattttttacatcttgaacttctacactgtattttgtaatcggctggaatagcgccgcattatccaaagattgatgtgtccgttttaaacgatctgcacggatcacgtttccagcaagcgcaacgacagggtctccttcagtgttcgctgtcagcaggcctgttgccaagttagaggcacccggtcctgatgtgactaacacgactcccggttttccagttaaacggccgactgcttgggccatgaatgctgcgttttgttcgtgccgggcaacgataatttcaggtcctttatcttgtaaagcgtcaaataccgcatcaatttttgcacctggaatgccaaatacatgtgtgacaccttgctccactaagcaatcaacaacaagctccgcccctctgtttttcacaagggatttttgttcttttgttgcttttgtcaacatcctcagctctagatttgaatatgtattacttggttatggttatatatgacaaaagaaaaagaagaacagaagaataacgcaaggaagaacaataactgaaattgatagagaagtattatgtctttgtctttttataataaatcaagtgcagaaatccgttagacaacatgagggataaaatttaacgtgggcgaagaagaaggaaaaaagtttttgtgagggcgtaattgaagcgatctgttgattgtagattttttttttttgaggagtcaaagtcagaagagaacagacaaatggtattaaccatccaatacttttttggagcaacgctaagctcatgcttttccattggttacgtgctcagttgttagatatggaaagagaggatgctcacggcagcgtgactccaattgagcccgaaagagaggatgccacgttttcccgacggctgctagaatggaaaaaggaaaaatagaagaatcccattcctatcattatttacgtaatgacccacacatttttgagattttcaactattacgtattacgataatcctgctgtcattatcattattatctatatcgacgtatgcaacgtatgtgaagccaagtaggcaattatttagtactgtcagtattgttattcatttcagatcttaagcctaaccaggccaattcaacagactgtcggcaacttcttgtctggtctttccatggtaagtgacagtgcagtaataatatgaaccaatttatttttcgttacataaaaatgcttataaaactttaactaataattagagattaaatcgcaaacggccgactctagaggatcccccaccttggctaactcgttgtatcatcactggataacttcgtatagcatacattatacgaagttatctagggattcataaccattttctcaatcgaattacacagaacacaccgtacaaacctctctatcataactacttaatagtcacacacgtactcgtctaaatacacatcatcgtcctacaagttcatcaaagtgttggacagacaactataccagcatggatctcttgtatcggttcttttctcccgctctctcgcaataacaatgaacactgggtcaatcatagcctacacaggtgaacagagtagcgtttatacagggtttatacggtgattcctacggcaaaaatttttcatttctaaaaaaaaaaagaaaaatttttctttccaacgctagaaggaaaagaaaaatctaattaaattgatttggtgattttctgagagttccctttttcatatatcgaattttgaatataaaaggagatcgaaaaaatttttctattcaatctgttttctggttttatttgatagtttttttgtgtattattattatggattagtactggtttatatgggtttttctgtataacttctttttattttagtttgtttaatcttattttgagttacattatagttccctaactgcaagagaagtaacattaaaactcgagatgggtaaggaaaagactcacgtttcgaggccgcgattaaattccaacatggatgctgatttatatgggtataaatgggctcgcgataatgtcgggcaatcaggtgcgacaatctatcgattgtatgggaagcccgatgcgccagagttgtttctgaaacatggcaaaggtagcgttgccaatgatgttacagatgagatggtcagactaaactggctgacggaatttatgcctcttccgaccatcaagcattttatccgtactcctgatgatgcatggttactcaccactgcgatccccggcaaaacagcattccaggtattagaagaatatcctgattcaggtgaaaatattgttgatgcgctggcagtgttcctgcgccggttgcattcgattcctgtttgtaattgtccttttaacagcgatcgcgtatttcgtctcgctcaggcgcaatcacgaatgaataacggtttggttgatgcgagtgattttgatgacgagcgtaatggctggcctgttgaacaagtctggaaagaaatgcataagcttttgccattctcaccggattcagtcgtcactcatggtgatttctcacttgataaccttatttttgacgaggggaaattaataggttgtattgatgttggacgagtcggaatcgcagaccgataccaggatcttgccatcctatggaactgcctcggtgagttttctccttcattacagaaacggctttttcaaaaatatggtattgataatcctgatatgaataaattgcagtttcatttgatgctcgatgagtttttctaagtttaacttgatactactagattttttctcttcatttataaaatttttggttataattgaagctttagaagtatgaaaaaatccttttttttcattctttgcaaccaaaataagaagcttcttttattcattgaaatgatgaatataaacctaacaaaagaaaaagactcgaatatcaaacattaaaaaaaaataaaagaggttatctgttttcccatttagttggagtttgcattttctaatagatagaactctcaattaatgtggatttagtttctctgttcgataacttcgtatagcatacattatacgaagttatctgaacattagaatacgtaatccgcaatgcggggccgcttaattaatctagagtcgacctgcaggcatgcaagcttggcgtaatcatggtcatagctgtttcctgtgtgaaattgttatccgctcacaattccacacaacatacgagccggaagcataaagtgtaaagcctggggtgcctaatgagtgagctaactcacattaattgcgttgcgctcactgcccgctttccagtcgggaaacctgtcgtgccagctgcattaatgaatcggccaacgcgcggggagaggcggtttgcgtattgggcgctcttccgcttcctcgctcactgactcgctgcgctcggtcgttcggctgcggcgagcggtatcagctcactcaaaggcggtaatacggttatccacagaatcaggggataacgcaggaaagaacatgtgagcaaaaggccagcaaaaggccaggaaccgtaaaaaggccgcgttgctggcgtttttccataggctccgcccccctgacgagcatcacaaaaatcgacgctcaagtcagaggtggcgaaacccgacaggactataaagataccaggcgtttccccctggaagctccctcgtgcgctctcctgttccgaccctgccgcttaccggatacctgtccgcctttctcccttcgggaagcgtggcgctttctcatagctcacgctgtaggtatctcagttcggtgtaggtcgttcgctccaagctgggctgtgtgcacgaaccccccgttcagcccgaccgctgcgccttatccggtaactatcgtcttgagtccaacccggtaagacacgacttatcgccactggcagcagccactggtaacaggattagcagagcgaggtatgtaggcggtgctacagagttcttgaagtggtggcctaactacggctacactagaaggacagtatttggtatctgcgctctgctgaagccagttaccttcggaaaaagagttggtagctcttgatccggcaaacaaaccaccgctggtagcggtggtttttttgtttgcaagcagcagattacgcgcagaaaaaaaggatctcaagaagatcctttgatcttttctacggggtctgacgctcagtggaacgaaaactcacgttaagggattttggtcatgagattatcaaaaaggatcttcacctagatccttttaaattaaaaatgaagttttaaatcaatctaaagtatatatgagtaaacttggtctgacagttaccaatgcttaatcagtgaggcacctatctcagcgatctgtctatttcgttcatccatagttgcctgactccccgtcgtgtagataactacgatacgggagggcttaccatctggccccagtgctgcaatgataccgcgagacccacgctcaccggctccagatttatcagcaataaaccagccagccggaagggccgagcgcagaagtggtcctgcaactttatccgcctccatccagtctattaattgttgccgggaagctagagtaagtagttcgccagttaatagtttgcgcaacgttgttgccattgctacaggcatcgtggtgtcacgctcgtcgtttggtatggcttcattcagctccggttcccaacgatcaaggcgagttacatgatcccccatgttgtgcaaaaaagcggttagctccttcggtcctccgatcgttgtcagaagtaagttggccgcagtgttatcactcatggttatggcagcactgcataattctcttactgtcatgccatccgtaagatgcttttctgtgactggtgagtactcaaccaagtcattctgagaatagtgtatgcggcgaccgagttgctcttgcccggcgtcaatacgggataataccgcgccacatagcagaactttaaaagtgctcatcattggaaaacgttcttcggggcgaaaactctcaaggatcttaccgctgttgagatccagttcgatgtaacccactcgtgcacccaactgatcttcagcatcttttactttcaccagcgtttctgggtgagcaaaaacaggaaggcaaaatgccgcaaaaaagggaataagggcgacacggaaatgttgaatactcatactcttcctttttcaatattattgaagcatttatcagggttattgtctcatgagcggatacatatttgaatgtatttagaaaaataaacaaataggggttccgcgcacatttccccgaaaagtgccacctgacgtctaagaaaccattattatcatgacattaacctataaaaataggcgtatcacgaggccctttcgtctcgcgcgtttcggtgatgacggtgaaaacctctgacacatgcagctcccggagacggtcacagcttgtctgtaagcggatgccgggagcagacaagcccgtcagggcgcgtcagcgggtgttggcgggtgtcggggctggcttaactatgcggcatcagagcagattgtactgagagtgcaccatatgcggtgtgaaataccgcacagatgcgtaaggagaaaataccgcatcaggcgccattcgccattcaggctgcgcaactgttgggaagggcgatcggtgcgggcctcttcgctattacgccagctggcgaaagggggatgtgctgcaaggcgattaagttgggtaacgccagggttttcccagtcacgacgttgtaaaacgacggccagtgaattcgagctcggtacccggggatccggcgcgccgttt

SEQ ID NO: 256 - DNA, 48 bp, Artificial Sequence
  T-alsS(URA) primer
tgatacaacgagttagccaaggtggatctgaaatgaataacaatactg

SEQ ID NO: 257 - DNA, 89 bp, Artificial Sequence
  B-alsS(gpd_60bp) primer
attggttgggggaaaaagaggcaacaggaaagatcagagggggagggggagggggggtgtctagagagctttcgttttcatgagttccc

SEQ ID NO: 258 - DNA, 23 bp, Artificial Sequence
  FBA-als1557 primer
ccgaaattctggaatatcaatgg

SEQ ID NO: 259 - DNA, 24 bp, Artificial Sequence
  gpd2-down178 primer
cgataatagcgtgtataatggtag

SEQ ID NO: 260 - DNA, 7555 bp, Artificial Sequence; identical to SEQ ID NO: 189
  pRS423: : Gal1-cre plasmid

SEQ ID NO: 261 - DNA, 33 bp, Artificial Sequence
  gpd2-up229 primer
gttcagcagctcttctctaccctgtcattctag

SEQ ID NO: 262 - DNA, 27 bp, Artificial Sequence
  FBA-als752 primer
gcttagtggagcaaggtgtcacacatg

SEQ ID NO: 263 - DNA, 10679 bp, Artificial Sequence
  pBP1339 (=pA-UAS(PGK1)-ENO2p-ilvD-TEF1t-ILV5p-adh-B-U-C) plasmid
tcgcgcgtttcggtgatgacggtgaaaacctctgacacatgcagctcccggagacggtcacagcttgtctgtaagcggatgccgggagcagacaagcccgtcagggcgcgtcagcgggtgttggcgggtgtcggggctggcttaactatgcggcatcagagcagattgtactgagagtgcaccatatgcggtgtgaaataccgcacagatgcgtaaggagaaaataccgcatcaggcgccattcgccattcaggctgcgcaactgttgggaagggcgatcggtgcgggcctcttcgctattacgccagctggcgaaagggggatgtgctgcaaggcgattaagttgggtaacgccagggttttcccagtcacgacgttgtaaaacgacggccagtgaattcgagctcggtacccggggatccgcgatcgcaaagactacgagaatcaataaacgaggctaaactgcgtcacacatgattgtgattgagtactcacgttctcgtgttaatcccgcggtcttcttgttttactaacttttctttctctcatagcattctcttgacagtgttttatatacatcatatgtacatttatcgagccaatcgagggcagcagtttaacatcaagccggatttgctcacgctactttgaccccttttcgtttcgacggagagaagaaaccggtgttttcctatccttgcctattctttcctccttacggggtcctagcctgtttctcttgatatgataataggtggaaacgtagaaaaaaaaatcgacatataaaagtggggcagatacttcgtgtgacaatggccaattcaagccctttgggcagatgttgcccttcttctttcttaaaaagtcttagtacgattgaccaagtcagaaaaaaaaaaaaaaaggaactaaaaaaagttttaattaattatttaaatcgaacagagaaactaaatccacattaattgagagttctatctattagaaaatgcaaactccaactaaatgggaaaacagataacctcttttatttttttttaatgtttgatattcgagtctttttcttttgttaggtttatattcatcatttcaatgaataaaagaagcttcttattttggttgcaaagaatgaaaaaaaaggattttttcatacttctaaagcttcaattataaccaaaaattttataaatgaagagaaaaaatctagtagtatcaagttaaacgcggccgcttaaccacagcaaccaggacaacattttttgccagtttcttcaggcttccaaaagtctgttacggctcccctagaagcagacgaaacgatgtgagcatatttaccaaggataccgcgtgaatagagcggtggcaattcaatggtctcttgacgatgttttaactcttcatcggagatatcaaagtgtaattccttagtgtcttggtcaatagtgactatgtctcctgtttgcaggtaggcgattggaccgccatcttgtgcttcaggagcgatatgacccacgacaagaccataagtaccacctgagaagcggccatctgtcagaagggcaactttttcaccttgccctttaccaacaatcattgatgaaagggaaagcatttcaggcataccaggaccgccctttggtcctacaaaacgtacgacaacaacatcaccatcaacaatatcatcattcaagacagcttcaatggcttcttcttcagaattaaagaccttagcaggaccgacatgacgacgcacttttacaccagaaactttggcaacggcaccgtctggagccaagttaccatggagaataatgagcggaccatcttcacgtttaggattttcaagcggcataataaccttttgaccaggtgttaaatcatcaaaagccttcaaattttcagcgactgttttgccagtacaagtgatacggtcaccatgaaggaagccatttttaaggagatatttcataactgctggtacccctccgaccttgtaaaggtcttggaatacatattgaccagaaggtttcaaatcagccaaatgaggaactttttcttggaaagtattgaaatcatcaagtgtcaattccacattagcagcatgggcaatagctaagaggtgaagggttgagttggttgaacctcccagagccatagttacagtaatagcatcttcaaaagcttcacgcgttaaaatgtcagaaggttttaagcccatttcgagcattttgacaacagcgcgaccagcttcttcaatatctgctttcttttctgcggattcagccgggtgagaagatgaacccggaaggctaagtcccaaaacttcaatagctgtcgccattgtgttagcagtatacataccaccgcagcctccaggaccgggacaagcattacattccaaagctttaacttcttctttggtcatatcgccgtggttccaatggccgacaccttcaaagacagagactaaatcgatatctttgccgtctaaattaccaggtgcaattgttccgccgtaagcaaaaatggctgggatatccatgttagccatagcgataacagaaccgggcatgtttttatcacaaccgccaatggctacaaaagcatccgcattatgacctcccatggctgcttcaatagaatctgcaataatatcacgagatgtcaaggagaaacgcattccttgggttcccatggcgattccatcagaaaccgtgattgttccgaactgaactggccaagcaccagcttccttaacaccgactttggctagtttaccaaagtcatgtaagtggatattacaaggtgtgttttcagcccaagttgaaatgacaccgacgataggtttttcaaagtcttcatcttgcataccagttgcacgcaacatagcacgattaggtgatttaaccattgaatcgtaaacagaactacgatttcttaagtctttaagagtttttttgtcagtcatactagtattattgtatgttatagtattagttgcttggtgttatgaaagaaactaagaaaagaaaaataaaataaaaataaaagattgagacaagggaagaaaagatacaaaataagaattaattacaattgcgtttgctataaatacgtttttaacaatcaactctggtaggaagataatgctttttttttttatatatgcttggtgccacttgtcacatacaattctacaaccttcgacaaaaatccaaatgatagtaagatcaaagccagaaagcaatggagaaaaaaaattaatgaaccacgatgaaccaaatgatcaatacaaccaaagaaactaccctagtgaggtgtatgctgacttggtatcacacttcatgaattttgcatatggcaaagtccacgaaagtgggcttcagaaaaaaggcgtgcggtgtgtagatgtatcaattagtggatgccagttttggaacgggattccactttccgcaagttggtgcacgtcgttagtgacataacgccgcgtcgacaggaccttgttgtgtgacgaaattggaagctgcaatcaataggaagacaggaagtcgagcgtgtctgggttttttcagttttgttctttttgcaaacaaatcacgagcgacggtaattggcgcgccacctggtaaaacctctagtggagtagtagatgtaatcaatgaagcggaagccaaaagaccagagtagaggcctatagaagaaactgcgataccttttgtgatggctaaacaaacagacatctttttatatgtttttacttctgtatatcgtgaagtagtaagtgataagcgaatttggctaagaacgttgtaagtgaacaagggacctcttttgcctttcaaaaaaggattaaatggagttaatcattgagatttagttttcgttagattctgtatccctaaataactcccttacccgacgggaaggcacaaaagacttgaataatagcaaacggccagtagccaagaccaaataatactagagttaactgatggtcttaaacaggcattacgtggtgaactccaagaccaatatacaaaatatcgataagttattcttgcccaccaatttaaggagcctacatcaggacagtagtaccattcctcagagaagaggtatacataacaagaaaatcgcgtgaacaccttatataacttagcccgttattgagctaaaaaaccttgcaaaatttcctatgaataagaatacttcagacgtgataaaaatttactttctaactcttctcacgctgcccctatctgttcttccgctctaccgtgagaaataaagcatcgagtacggcagttcgctgtcactgaactaaaacaataaggctagttcgaatgatgaacttgcttgctgtcaaacttctgagttgccgctgatgtgacactgtgacaataaattcaaaccggttatagcggtctcctccggtaccggttctgccacctccaatagagctcagtaggagtcagaacctctgcggtggctgtcagtgactcatccgcgtttcgtaagttgtgcgcgtgcacatttcgcccgttcccgctcatcttgcagcaggcggaaattttcatcacgctgtaggacgcaaaaaaaaaataattaatcgtacaagaatcttggaaaaaaaattgaaaaattttgtataaaagggatgacctaacttgactcaatggcttttacacccagtattttccctttccttgtttgttacaattatagaagcaagacaaaaacatatagacaacctattcctaggagttatatttttttaccctaccagcaatataagtaaaaaactgtttatgaaagcattagtgtataggggcccaggccagaagttggtggaagagagacagaagccagagcttaaggaacctggtgacgctatagtgaaggtaacaaagactacaatttgcggaaccgatctacacattcttaaaggtgacgttgcgacttgtaaacccggtcgtgtattagggcatgaaggagtgggggttattgaatcagtcggatctggggttactgctttccaaccaggcgatagagttttgatatcatgtatatcgagttgcggaaagtgctcattttgtagaagaggaatgttcagtcactgtacgaccgggggttggattctgggcaacgaaattgatggtacccaagcagagtacgtaagagtaccacatgctgacacatccctttatcgtattccggcaggtgcggatgaagaggccttagtcatgttatcagatattctaccaacgggttttgagtgcggagtcctaaacggcaaagtcgcacctggttcttcggtggctatagtaggtgctggtcccgttggtttggccgccttactgacagcacaattctactccccagctgaaatcataatgatcgatcttgatgataacaggctgggattagccaaacaatttggtgccaccagaacagtaaactccacgggtggtaacgccgcagccgaagtgaaagctcttactgaaggcttaggtgttgatactgcgattgaagcagttgggatacctgctacatttgaattgtgtcagaatatcgtagctcccggtggaactatcgctaatgtcggcgttcacggtagcaaagttgatttgcatcttgaaagtttatggtcccataatgtcacgattactacaaggttggttgacacggctaccaccccgatgttactgaaaactgttcaaagtcacaagctagatccatctagattgataacacatagattcagcctggaccagatcttggacgcatatgaaacttttggccaagctgcgtctactcaagcactaaaagtcatcatttcgatggaggcttgattaattaagagtaagcgaatttcttatgatttatgatttttattattaaataagttataaaaaaaataagtgtatacaaattttaaagtgactcttaggttttaaaacgaaaattcttattcttgagtaactctttcctgtaggtcaggttgctttctcaggtatagcatgaggtcgctcttattgaccacacctctaccggcatgccgagcaaatgcctgcaaatcgctccccatttcacccaattgtagatatgctaactccagcaatgagttgatgaatctcggtgtgtattttatgtcctcagaggacaacacctgtggtgtttaaactgacaaaataatatttggggcccctcgcggctcatttgtagtatctaagattatgtattttcttttataatatttgttgttatgaaacagacagaagtaagtttctgcgactatattatttttttttttcttctttttttttcctttattcaacttggcgatgagctgaaaatttttttggttaaggaccctttagaagtattgaatgtgggaacaaagacgacaaaaggtagttttttccttgactatactggtaagatatcgtctaaaacaaagcatggccaagaaaatatcaaagaattcaagagctgctagacaatcggatgctcttgaaccagaggtaaaggatttaagtgaactacctagagctgaaaaaaccgatttgactaatattttgattagaacagcagccaagaatgaggcattgctggaagcaaagatatctaagaaagccaataaaagtaagaggggcaagaagttaaataaaaaggctctggaagggccggccaatgtggctgtggtttcagggtccataaagcttttcaattcatcttttttttttttgttcttttttttgattccggtttctttgaaatttttttgattcggtaatctccgagcagaaggaagaacgaaggaaggagcacagacttagattggtatatatacgcatatgtggtgttgaagaaacatgaaattgcccagtattcttaacccaactgcacagaacaaaaacctgcaggaaacgaagataaatcatgtcgaaagctacatataaggaacgtgctgctactcatcctagtcctgttgctgccaagctatttaatatcatgcacgaaaagcaaacaaacttgtgtgcttcattggatgttcgtaccaccaaggaattactggagttagttgaagcattaggtcccaaaatttgtttactaaaaacacatgtggatatcttgactgatttttccatggagggcacagttaagccgctaaaggcattatccgccaagtacaattttttactcttcgaagacagaaaatttgctgacattggtaatacagtcaaattgcagtactctgcgggtgtatacagaatagcagaatgggcagacattacgaatgcacacggtgtggtgggcccaggtattgttagcggtttgaagcaggcggcggaagaagtaacaaaggaacctagaggccttttgatgttagcagaattgtcatgcaagggctccctagctactggagaatatactaagggtactgttgacattgcgaagagcgacaaagattttgttatcggctttattgctcaaagagacatgggtggaagagatgaaggttacgattggttgattatgacacccggtgtgggtttagatgacaagggagacgcattgggtcaacagtatagaaccgtggatgatgtggtctctacaggatctgacattattattgttggaagaggactatttgcaaagggaagggatgctaaggtagagggtgaacgttacagaaaagcaggctgggaagcatatttgagaagatgcggccagcaaaactaaaaaactgtattataagtaaatgcatgtatactaaactcacaaattagagcttcaatttaattatatcagttattacccgggaatctcggtcgtaatgatttctataatgacgaaaaaaaaaaaattggaaagaaaaagcttcatggccttgcggccgcttgtagtgtctgaaattgcagagagaagaatagaaatggccaagaaactgggcgttgaggtgttcaatccctccaagcacggtcataaatctatagagatactacgtggtttgaccaagagccatgatgggtttgattacagttatgattgttctggtattcaagttactttcgaaacctctttgaaggcattaacattcaaggggacagccaccaacattgcagtttggggtccaaaacctgtcccattccaaccaatggatgtgactctccaagagaaagttatgactggttcgatcggctatgttgtcgaagccttcgaagaagttgttcgtgccatccacaacggagacatcgccatggaagattgtaagcaactaatcactggtaagcaaaggattgaggacggttgggaaaagggattccaagagttgatggatcacaaggaatccaacgttaagattctattgacgcctaacaatcacggtgaaatgaagtaattaattaatctagagtcgacctgcaggcatgcaagcttggcgtaatcatggtcatagctgtttcctgtgtgaaattgttatccgctcacaattccacacaacatacgagccggaagcataaagtgtaaagcctggggtgcctaatgagtgagctaactcacattaattgcgttgcgctcactgcccgctttccagtcgggaaacctgtcgtgccagctgcattaatgaatcggccaacgcgcggggagaggcggtttgcgtattgggcgctcttccgcttcctcgctcactgactcgctgcgctcggtcgttcggctgcggcgagcggtatcagctcactcaaaggcggtaatacggttatccacagaatcaggggataacgcaggaaagaacatgtgagcaaaaggccagcaaaaggccaggaaccgtaaaaaggccgcgttgctggcgtttttccataggctccgcccccctgacgagcatcacaaaaatcgacgctcaagtcagaggtggcgaaacccgacaggactataaagataccaggcgtttccccctggaagctccctcgtgcgctctcctgttccgaccctgccgcttaccggatacctgtccgcctttctcccttcgggaagcgtggcgctttctcatagctcacgctgtaggtatctcagttcggtgtaggtcgttcgctccaagctgggctgtgtgcacgaaccccccgttcagcccgaccgctgcgccttatccggtaactatcgtcttgagtccaacccggtaagacacgacttatcgccactggcagcagccactggtaacaggattagcagagcgaggtatgtaggcggtgctacagagttcttgaagtggtggcctaactacggctacactagaaggacagtatttggtatctgcgctctgctgaagccagttaccttcggaaaaagagttggtagctcttgatccggcaaacaaaccaccgctggtagcggtggtttttttgtttgcaagcagcagattacgcgcagaaaaaaaggatctcaagaagatcctttgatcttttctacggggtctgacgctcagtggaacgaaaactcacgttaagggattttggtcatgagattatcaaaaaggatcttcacctagatccttttaaattaaaaatgaagttttaaatcaatctaaagtatatatgagtaaacttggtctgacagttaccaatgcttaatcagtgaggcacctatctcagcgatctgtctatttcgttcatccatagttgcctgactccccgtcgtgtagataactacgatacgggagggcttaccatctggccccagtgctgcaatgataccgcgagacccacgctcaccggctccagatttatcagcaataaaccagccagccggaagggccgagcgcagaagtggtcctgcaactttatccgcctccatccagtctattaattgttgccgggaagctagagtaagtagttcgccagttaatagtttgcgcaacgttgttgccattgctacaggcatcgtggtgtcacgctcgtcgtttggtatggcttcattcagctccggttcccaacgatcaaggcgagttacatgatcccccatgttgtgcaaaaaagcggttagctccttcggtcctccgatcgttgtcagaagtaagttggccgcagtgttatcactcatggttatggcagcactgcataattctcttactgtcatgccatccgtaagatgcttttctgtgactggtgagtactcaaccaagtcattctgagaatagtgtatgcggcgaccgagttgctcttgcccggcgtcaatacgggataataccgcgccacatagcagaactttaaaagtgctcatcattggaaaacgttcttcggggcgaaaactctcaaggatcttaccgctgttgagatccagttcgatgtaacccactcgtgcacccaactgatcttcagcatcttttactttcaccagcgtttctgggtgagcaaaaacaggaaggcaaaatgccgcaaaaaagggaataagggcgacacggaaatgttgaatactcatactcttcctttttcaatattattgaagcatttatcagggttattgtctcatgagcggatacatatttgaatgtatttagaaaaataaacaaataggggttccgcgcacatttccccgaaaagtgccacctgacgtctaagaaaccattattatcatgacattaacctataaaaataggcgtatcacgaggccctttcgtc

SEQ ID NO: 264 - DNA, 40 bp, Artificial Sequence
  oBP685 primer
aattggatccgcgatcgcaaagactacgagaatcaataaa

SEQ ID NO: 265 - DNA, 34 bp, Artificial Sequence
  oBP690 primer
aattttaattaattacttcatttcaccgtgattg

SEQ ID NO: 266 - DNA, 22 bp, Artificial Sequence
  oBP726 primer
atcaagattattctgactccaa

SEQ ID NO: 267 - DNA, 33 bp, Artificial Sequence
  DSm1354F primer
cgggttcatcttctcacccggctgaatccgcag

SEQ ID NO: 268 - DNA, 26 bp, Artificial Sequence
  DSm788R primer
gcttcacgcgttaaaatgtcagaagg

SEQ ID NO: 269 - DNA, 33 bp, Artificial Sequence; identical to SEQ ID NO: 267
  DSm696F primer

SEQ ID NO: 270 - DNA, 26 bp, Artificial Sequence
  ADHBi643R primer
cggctgcggcgttaccacccgtggag

SEQ ID NO: 271 - DNA, 26 bp, Artificial Sequence
  ADHBi554F primer
cccgttggtttggccgccttactgac

SEQ ID NO: 272 - DNA, 23 bp, Artificial Sequence
  N1251 primer
ccaatgtggctgtggtttcaggg

SEQ ID NO: 273 - DNA, 26 bp, Artificial Sequence
  N1252 primer
gcaaggccatgaagctttttctttcc

SEQ ID NO: 274 - DNA, 57 bp, Artificial Sequence
  N1253 primer
gaaaaagcttcatggccttgcgctcatcaacactaaaattagagtcattctaattgc

SEQ ID NO: 275 - DNA, 29 bp, Artificial Sequence
  N1254 primer
ttatccacggaagatatgatgaggtgacg

SEQ ID NO: 276 - DNA, 29 bp, Artificial Sequence
  N1256 primer
acctagctaaactaagtaaatctgtatac

SEQ ID NO: 277 - DNA, 64 bp, Artificial Sequence
  N1255 primer
ggaccctgaaaccacagccacattggtaccttccttgccaaagggattaaacctgacaattacc

SEQ ID NO: 278 - DNA, 29 bp, Artificial Sequence
  N1257 primer
gatgatgctatttggtgcagagggtgatg

SEQ ID NO: 279 - DNA, 60 bp, Artificial Sequence
  N1258 primer
cagatttacttagtttagctaggtgtatcaaaatacgttctcaatgttctatttcccgcc

SEQ ID NO: 280 - DNA, 28 bp, Artificial Sequence
  N1249 primer
gctttatggaccctgaaaccacagccac

SEQ ID NO: 281 - DNA, 25 bp, Artificial Sequence
  N1239 primer
gacgaggataatgtgcatgaacggg

SEQ ID NO: 282 - DNA, 27 bp, Artificial Sequence
  N1250 primer
ggaaagaaaaagcttcatggccttgcg

SEQ ID NO: 283 - DNA, 24 bp, Artificial Sequence
  N1242 primer
gtttcgttgcgttggtggaatggc

SEQ ID NO: 284 - DNA, 12518 bp, Artificial Sequence
  pK9D3.OLE1p.IlvD plasmid
ttcaatgctatcatttcctttgatattggatcatatgcatagtaccgagaaactagaggatctcccattaccgacatttgggcgctatacgtgcatatgttcatgtatgtatctgtatttaaaacacttttgtattatttttcctcatatatgtgtataggtttatacggatgatttaattattacttcaccaccctttatttcaggctgatatcttagccttgttactagattaatcatgtaattagttatgtcacgcttacattcacgccctccccccacatccgctctaaccgaaaaggaaggagttagacaacctgaagtctaggtccctatttatttttttatagttatgttagtattaagaacgttatttatatttcaaatttttcttttttttctgtacagacgcgtgtacgcatgtaacattatactgaaaaccttgcttgagaaggttttgggacgctcgaaggctttaatttgcgggcggccgcacctggtaaaacctctagtggagtagtagatgtaatcaatgaagcggaagccaaaagaccagagtagaggcctatagaagaaactgcgataccttttgtgatggctaaacaaacagacatctttttatatgtttttacttctgtatatcgtgaagtagtaagtgataagcgaatttggctaagaacgttgtaagtgaacaagggacctcttttgcctttcaaaaaaggattaaatggagttaatcattgagatttagttttcgttagattctgtatccctaaataactcccttacccgacgggaaggcacaaaagacttgaataatagcaaacggccagtagccaagaccaaataatactagagttaactgatggtcttaaacaggcattacgtggtgaactccaagaccaatatacaaaatatcgataagttattcttgcccaccaatttaaggagcctacatcaggacagtagtaccattcctcagagaagaggtatacataacaagaaaatcgcgtgaacaccttatataacttagcccgttattgagctaaaaaaccttgcaaaatttcctatgaataagaatacttcagacgtgataaaaatttactttctaactcttctcacgctgcccctatctgttcttccgctctaccgtgagaaataaagcatcgagtacggcagttcgctgtcactgaactaaaacaataaggctagttcgaatgatgaacttgcttgctgtcaaacttctgagttgccgctgatgtgacactgtgacaataaattcaaaccggttatagcggtctcctccggtaccggttctgccacctccaatagagctcagtaggagtcagaacctctgcggtggctgtcagtgactcatccgcgtttcgtaagttgtgcgcgtgcacatttcgcccgttcccgctcatcttgcagcaggcggaaattttcatcacgctgtaggacgcaaaaaaaaaataattaatcgtacaagaatcttggaaaaaaaattgaaaaattttgtataaaagggatgacctaacttgactcaatggcttttacacccagtattttccctttccttgtttgttacaattatagaagcaagacaaaaacatatagacaacctattcctaggagttatatttttttaccctaccagcaatataagtaaaaaactgtttaaacagtatggaagaatgtaagatggctaagatttactaccaagaagactgtaacttgtccttgttggatggtaagactatcgccgttatcggttacggttctcaaggtcacgctcatgccctgaatgctaaggaatccggttgtaacgttatcattggtttatacgaaggtgctaaggattggaaaagagctgaagaacaaggtttcgaagtctacaccgctgctgaagctgctaagaaggctgacatcattatgatcttgatcaacgatgaaaagcaggctaccatgtacaaaaacgacatcgaaccaaacttggaagccggtaacatgttgatgttcgctcacggtttcaacatccatttcggttgtattgttccaccaaaggacgttgatgtcactatgatcgctccaaagggtccaggtcacaccgttagatccgaatacgaagaaggtaaaggtgtcccatgcttggttgctgtcgaacaagacgctactggcaaggctttggatatggctttggcctacgctttagccatcggtggtgctagagccggtgtcttggaaactaccttcagaaccgaaactgaaaccgacttgttcggtgaacaagctgttttatgtggtggtgtctgcgctttgatgcaggccggttttgaaaccttggttgaagccggttacgacccaagaaacgcttacttcgaatgtatccacgaaatgaagttgatcgttgacttgatctaccaatctggtttctccggtatgcgttactctatctccaacactgctgaatacggtgactacattaccggtccaaagatcattactgaagataccaagaaggctatgaagaagattttgtctgacattcaagatggtacctttgccaaggacttcttggttgacatgtctgatgctggttcccaggtccacttcaaggctatgagaaagttggcctccgaacacccagctgaagttgtcggtgaagaaattagatccttgtactcctggtccgacgaagacaagttgattaacaactgaggccctgcaggccagaggaaaataatatcaagtgctggaaactttttctcttggaatttttgcaacatcaagtcatagtcaattgaattgacccaatttcacatttaagattttttttttttcatccgacatacatctgtacactaggaagccctgtttttctgaagcagcttcaaatatatatattttttacatatttattatgattcaatgaacaatctaattaaatcgaaaacaagaaccgaaacgcgaataaataatttatttagatggtgacaagtgtataagtcctcatcgggacagctacgatttctctttcggttttggctgagctactggttgctgtgacgcagcggcattagcgcggcgttatgagctaccctcgtggcctgaaagatggcgggaataaagcggaactaaaaattactgactgagccatattgaggtcaatttgtcaactcgtcaagtcacgtttggtggacggcccctttccaacgaatcgtatatactaacatgcgcgcgcttcctatatacacatatacatatatatatatatatatatgtgtgcgtgtatgtgtacacctgtatttaatttccttactcgcgggtttttcttttttctcaattcttggcttcctctttctcgagcggaccggatcctcgcgaactccaaaatgagctatcaaaaacgatagatcgattaggatgactttgaaatgactccgcagtggactggccgttaatttcaagcgtgagtaaaatagtgcatgacaaaagatgagctaggcttttgtaaaaatatcttacgttgtaaaattttagaaatcattatttccttcatatcattttgtcattgaccttcagaagaaaagagccgaccaataatataaataaataaataaaaataatattccattatttctaaacagattcaatactcattaaaaaactatatcaattaatttgaattaacgcggccgcttaaccacagcaaccaggacaacattttttgccagtttcttcaggcttccaaaagtctgttacggctcccctagaagcagacgaaacgatgtgagcatatttaccaaggataccgcgtgaatagagcggtggcaattcaatggtctcttgacgatgttttaactcttcatcggagatatcaaagtgtaattccttagtgtcttggtcaatagtgactatgtctcctgtttgcaggtaggcgattggaccgccatcttgtgcttcaggagcgatatgacccacgacaagaccataagtaccacctgagaagcggccatctgtcagaagggcaactttttcaccttgccctttaccaacaatcattgatgaaagggaaagcatttcaggcataccaggaccgccctttggtcctacaaaacgtacgacaacaacatcaccatcaacaatatcatcattcaagacagcttcaatggcttcttcttcagaattaaagaccttagcaggaccgacatgacgacgcacttttacaccagaaactttggcaacggcaccgtctggagccaagttaccatggagaataatgagcggaccatcttcacgtttaggattttcaagcggcataataaccttttgaccaggtgttaaatcatcaaaagccttcaaattttcagcgactgttttgccagtacaagtgatacggtcaccatgaaggaagccatttttaaggagatatttcataactgctggtacccctccgaccttgtaaaggtcttggaatacatattgaccagaaggtttcaaatcagccaaatgaggaactttttcttggaaagtattgaaatcatcaagtgtcaattccacattagcagcatgggcaatagctaagaggtgaagggttgagttggttgaacctcccagagccatagttacagtaatagcatcttcaaaagcttcacgcgttaaaatgtcagaaggttttaagcccatttcgagcattttgacaacagcgcgaccagcttcttcaatatctgctttcttttctgcggattcagccgggtgagaagatgaacccggaaggctaagtcccaaaacttcaatagctgtcgccattgtgttagcagtatacataccaccgcagcctccaggaccgggacaagcattacattccaaagctttaacttcttctttggtcatatcgccgtggttccaatggccgacaccttcaaagacagagactaaatcgatatctttgccgtctaaattaccaggtgcaattgttccgccgtaagcaaaaatggctgggatatccatgttagccatagcgataacagaaccgggcatgtttttatcacaaccgccaatggctacaaaagcatccgcattatgacctcccatggctgcttcaatagaatctgcaataatatcacgagatgtcaaggagaaacgcattccttgggttcccatggcgattccatcagaaaccgtgattgttccgaactgaactggccaagcaccagcttccttaacaccgactttggctagtttaccaaagtcatgtaagtggatattacaaggtgtgttttcagcccaagttgaaatgacaccgacgataggtttttcaaagtcttcatcttgcataccagttgcacgcaacatagcacgattaggtgatttaaccattgaatcgtaaacagaactacgatttcttaagtctttaagagtttttttgtcagtcatactcacgtgctttgttgtaatgttttagtgctgtttataatatgatcaccacaactatctattactatgatgttctattctacgtaatacaaaatataaacggaaacagaagtaggaaagatggaaatagaacaataaatgaatcaagatctgcccccatatatatatgtatatgctgatttgcaagactcgatgagccaggagccgatgatttgctgcatatattgttaactactattatttccacctttgtgtgccatccccatagccgtaacaatagggataggtgtgtctgagtgagcaagactcgtagaagcacacctggttgggcactagataaggtttgttgagtgttcaacgtccgaaagaaagctgccgactatgcgaagagaaccttaagccgttattacctctgcctgtcacaggcgatgtgatgctaacgaacagcaccagagccaagccaactggggcggtctgcagagaaggctgggatacccgaaatagctcgctcaacagctttttttcttctacggaagcccaccagataagcgcctttgttgggcccgctaaccccgggacatgcccgggctcggagttagtttttgcacggccggcagatctatttaaatggcgcgccgacgtcaggtggcacttttcggggaaatgtgcgcggaacccctatttgtttatttttctaaatacattcaaatatgtatccgctcatgagacaataaccctgataaatgcttcaataatattgaaaaaggaagagtatgagtattcaacatttccgtgtcgcccttattcccttttttgcggcattttgccttcctgtttttgctcacccagaaacgctggtgaaagtaaaagatgctgaagatcagttgggtgcacgagtgggttacatcgaactggatctcaacagcggtaagatccttgagagttttcgccccgaagaacgttttccaatgatgagcacttttaaagttctgctatgtggcgcggtattatcccgtattgacgccgggcaagagcaactcggtcgccgcatacactattctcagaatgacttggttgagtactcaccagtcacagaaaagcatcttacggatggcatgacagtaagagaattatgcagtgctgccataaccatgagtgataacactgcggccaacttacttctgacaacgatcggaggaccgaaggagctaaccgcttttttgcacaacatgggggatcatgtaactcgccttgatcgttgggaaccggagctgaatgaagccataccaaacgacgagcgtgacaccacgatgcctgtagcaatggcaacaacgttgcgcaaactattaactggcgaactacttactctagcttcccggcaacaattaatagactggatggaggcggataaagttgcaggaccacttctgcgctcggcccttccggctggctggtttattgctgataaatctggagccggtgagcgtgggtctcgcggtatcattgcagcactggggccagatggtaagccctcccgtatcgtagttatctacacgacggggagtcaggcaactatggatgaacgaaatagacagatcgctgagataggtgcctcactgattaagcattggtaactgtcagaccaagtttactcatatatactttagattgatttaaaacttcatttttaatttaaaaggatctaggtgaagatcctttttgataatctcatgaccaaaatcccttaacgtgagttttcgttccactgagcgtcagaccccgtagaaaagatcaaaggatcttcttgagatcctttttttctgcgcgtaatctgctgcttgcaaacaaaaaaaccaccgctaccagcggtggtttgtttgccggatcaagagctaccaactctttttccgaaggtaactggcttcagcagagcgcagataccaaatactgttcttctagtgtagccgtagttaggccaccacttcaagaactctgtagcaccgcctacatacctcgctctgctaatcctgttaccagtggctgctgccagtggcgataagtcgtgtcttaccgggttggactcaagacgatagttaccggataaggcgcagcggtcgggctgaacggggggttcgtgcacacagcccagcttggagcgaacgacctacaccgaactgagatacctacagcgtgagctatgagaaagcgccacgcttcccgaagggagaaaggcggacaggtatccggtaagcggcagggtcggaacaggagagcgcacgagggagcttccagggggaaacgcctggtatctttatagtcctgtcgggtttcgccacctctgacttgagcgtcgatttttgtgatgctcgtcaggggggcggagcctatggaaaaacgccagcaacgcggcctttttacggttcctggccttttgctggccttttgctcacatgttctttcctgcgttatcccctgattctgtggataaccgtattaccgcctttgagtgagctgataccgctcgccgcagccgaacgaccgagcgcagcgagtcagtgagcgaggaagcggaagagcgcccaatacgcaaaccgcctctccccgcgcgttggccgattcattaatgcagctggcacgacaggtttcccgactggaaagcgggcagtgagcgcaacgcaattaatgtgagttagctcactcattaggcaccccaggctttacactttatgcttccggctcgtatgttgtgtggaattgtgagcggataacaatttcacacaggaaacagctatgaccatgattacgccaagctttttctttccaattttttttttttcgtcattataaaaatcattacgaccgagattcccgggtaataactgatataattaaattgaagctctaatttgtgagtttagtatacatgcatttacttataatacagttttttagttttgctggccgcatcttctcaaatatgcttcccagcctgcttttctgtaacgttcaccctctaccttagcatcccttccctttgcaaatagtcctcttccaacaataataatgtcagatcctgtagagaccacatcatccacggttctatactgttgacccaatgcgtctcccttgtcatctaaacccacaccgggtgtcataatcaaccaatcgtaaccttcatctcttccacccatgtctctttgagcaataaagccgataacaaaatctttgtcgctcttcgcaatgtcaacagtacccttagtatattctccagtagatagggagcccttgcatgacaattctgctaacatcaaaaggcctctaggttcctttgttacttcttctgccgcctgcttcaaaccgctaacaatacctgggcccaccacaccgtgtgcattcgtaatgtctgcccattctgctattctgtatacacccgcagagtactgcaatttgactgtattaccaatgtcagcaaattttctgtcttcgaagagtaaaaaattgtacttggcggataatgcctttagcggcttaactgtgccctccatggaaaaatcagtcaagatatccacatgtgtttttagtaaacaaattttgggacctaatgcttcaactaactccagtaattccttggtggtacgaacatccaatgaagcacacaagtttgtttgcttttcgtgcatgatattaaatagcttggcagcaacaggactaggatgagtagcagcacgttccttatatgtagctttcgacatgatttatcttcgtttcctgcaggtttttgttctgtgcagttgggttaagaatactgggcaatttcatgtttcttcaacactacatatgcgtatatataccaatctaagtctgtgctccttccttcgttcttccttctgttcggagattaccgaatcaaaaaaatttcaaggaaaccgaaatcaaaaaaaagaataaaaaaaaaatgatgaattgaaaagcttgcatgcctgcaggtcgactctagtatactccgtctactgtacgatacacttccgctcaggtccttgtcctttaacgaggccttaccactcttttgttactctattgatccagctcagcaaaggcagtgtgatctaagattctatcttcgcgatgtagtaaaactagctagaccgagaaagagactagaaatgcaaaaggcacttctacaatggctgccatcattattatccgatgtgacgctgcattttttttttttttttttttttttttttttttttttttttttttttttttttgtacaaatatcataaaaaaagagaatctttttaagcaaggattttcttaacttcttcggcgacagcatcaccgacttcggtggtactgttggaaccacctaaatcaccagttctgatacctgcatccaaaacctttttaactgcatcttcaatggctttaccttcttcaggcaagttcaatgacaatttcaacatcattgcagcagacaagatagtggcgatagggttgaccttattctttggcaaatctggagcggaaccatggcatggttcgtacaaaccaaatgcggtgttcttgtctggcaaagaggccaaggacgcagatggcaacaaacccaaggagcctgggataacggaggcttcatcggagatgatatcaccaaacatgttgctggtgattataataccatttaggtgggttgggttcttaactaggatcatggcggcagaatcaatcaattgatgttgaactttcaatgtagggaattcgttcttgatggtttcctccacagtttttctccataatcttgaagaggccaaaacattagctttatccaaggaccaaataggcaatggtggctcatgttgtagggccatgaaagcggccattcttgtgattctttgcacttctggaacggtgtattgttcactatcccaagcgacaccatcaccatcgtcttcctttctcttaccaaagtaaatacctcccactaattctctaacaacaacgaagtcagtacctttagcaaattgtggcttgattggagataagtctaaaagagagtcggatgcaaagttacatggtcttaagttggcgtacaattgaagttctttacggatttttagtaaaccttgttcaggtctaacactaccggtaccccatttaggaccacccacagcacctaacaaaacggcatcagccttcttggaggcttccagcgcctcatctggaagtggaacacctgtagcatcgatagcagcaccaccaattaaatgattttcgaaatcgaacttgacattggaacgaacatcagaaatagctttaagaaccttaatggcttcggctgtgatttcttgaccaacgtggtcacctggcaaaacgacgatcttcttaggggcagacattacaatggtatatccttgaaatatatataaaaaaaaaaaaaaaaaaaaaaaaaaaaaatgcagcttctcaatgatattcgaatacgctttgaggagatacagcctaatatccgacaaactgttttacagatttacgatcgtacttgttacccatcattgaattttgaacatccgaacctgggagttttccctgaaacagatagtatatttgaacctgtataataatatatagtctagcgctttacggaagacaatgtatgtatttcggttcctggagaaactattgcatctattgcataggtaatcttgcacgtcgcatccccggttcattttctgcgtttccatcttgcacttcaatagcatatctttgttaacgaagcatctgtgcttcattttgtagaacaaaaatgcaacgcgagagcgctaatttttcaaacaaagaatctgagctgcatttttacagaacagaaatgcaacgcgaaagcgctattttaccaacgaagaatctgtgcttcatttttgtaaaacaaaaatgcaacgcgagagcgctaatttttcaaacaaagaatctgagctgcatttttacagaacagaaatgcaacgcgagagcgctattttaccaacaaagaatctatacttcttttttgttctacaaaaatgcatcccgagagcgctatttttctaacaaagcatcttagattactttttttctcctttgtgcgctctataatgcagtctcttgataactttttgcactgtaggtccgttaaggttagaagaaggctactttggtgtctattttctcttccataaaaaaagcctgactccacttcccgcgtttactgattactagcgaagctgcgggtgcattttttcaagataaaggcatccccgattatattctataccgatgtggattgcgcatactttgtgaacagaaagtgatagcgttgatgattcttcattggtcagaaaattatgaacggtttcttctattttgtctctatatactacgtataggaaatgtttacattttcgtattgttttcgattcactctatgaatagttcttactacaatttttttgtctaaagagtaatactagagataaacataaaaaatgtagaggtcgagtttagatgcaagttcaaggagcgaaaggtggatgggtaggttatatagggatatagcacagagatatatagcaaagagatacttttgagcaatgtttgtggaagcggtattcgcaatattttagtagctcgttacagtccggtgcgtttttggttttttgaaagtgcgtcttcagagcgcttttggttttcaaaagcgctctgaagttcctatactttctagagaataggaacttcggaataggaacttcaaagcgtttccgaaaacgagcgcttccgaaaatgcaacgcgagctgcgcacatacagctcactgttcacgtcgcacctatatctgcgtgttgcctgtatatatatatacatgagaagaacggcatagtgcgtgtttatgcttaaatgcgtacttatatgcgtctatttatgtaggatgaaaggtagtctagtacctcctgtgatattatcccattccatgcggggtatcgtatgcttccttcagcactaccctttagctgttctatatgctgccactcctcaattggattagtctcatcc

SEQ ID NO: 285 - DNA, 76 bp, Artificial Sequence
  oBB210 primer
gaaggagcacagacttagattggtatatatacgcatatgtagtgttgaaggtcctgttccctagcatgtacgtgag

SEQ ID NO: 286 - DNA, 80 bp, Artificial Sequence
  oBB211 primer
ccgagattcccgggtaataactgatataattaaattgaagctctaatttgtgaggaataccacttgccacctatcaccac

SEQ ID NO: 287 - DNA, 23 bp, Artificial Sequence
  AK109-1 primer
agtcacatcaagatcgtttatgg

SEQ ID NO: 288 - DNA, 23 bp, Artificial Sequence
  AK109-2 primer
gcacggaatatgggactacttcg

SEQ ID NO: 289 - DNA, 23 bp, Artificial Sequence
  AK109-3 primer
actccacttcaagtaagagtttg

SEQ ID NO: 290 - DNA, 24 bp, Artificial Sequence
  oBP452 primer
ttctcgacgtgggcctttttcttg

SEQ ID NO: 291 - DNA, 49 bp, Artificial Sequence
  oBP453 primer
tgcagctttaaataatcggtgtcactactttgccttcgtttatcttgcc

SEQ ID NO: 292 - DNA, 49 bp, Artificial Sequence
  oBP454 primer
gagcaggcaagataaacgaaggcaaagtagtgacaccgattatttaaag

SEQ ID NO: 293 - DNA, 49 bp, Artificial Sequence
  oBP455 primer
tatggaccctgaaaccacagccacattgtaaccaccacgacggttgttg

SEQ ID NO: 294 - DNA, 49 bp, Artificial Sequence
  oBP456 primer
tttagcaacaaccgtcgtggtggttacaatgtggctgtggtttcagggt

SEQ ID NO: 295 - DNA, 49 bp, Artificial Sequence
  oBP457 primer
ccagaaaccctatacctgtgtggacgtaaggccatgaagctttttcttt

SEQ ID NO: 296 - DNA, 49 bp, Artificial Sequence
  oBP458 primer
attggaaagaaaaagcttcatggccttacgtccacacaggtatagggtt

SEQ ID NO: 297 - DNA, 22 bp, Artificial Sequence
  oBP459 primer
cataagaacacctttggtggag

SEQ ID NO: 298 - DNA, 22 bp, Artificial Sequence
  oBP460 primer
aggattatcattcataagtttc

SEQ ID NO: 299 - DNA, 20 bp, Artificial Sequence
  LA135 primer
cttggcagcaacaggactag

SEQ ID NO: 300 - DNA, 23 bp, Artificial Sequence
  oBP461 primer
ttcttggagctgggacatgtttg

SEQ ID NO: 301 - DNA, 22 bp, Artificial Sequence
  LA92 primer
gagaagatgcggccagcaaaac

SEQ ID NO: 302 - DNA, 80 bp, Artificial Sequence
  LA678 primer
caacgttaacaccgttttcggtttgccaggtgacttcaacttgtccttgtgcattgcggattacgtattctaatgttcag

SEQ ID NO: 303 - DNA, 81 bp, Artificial Sequence
  LA679 primer
gtggagcatcgaagactggcaacatgatttcaatcattctgatcttagagcaccttggctaactcgttgtatcatcactgg

SEQ ID NO: 304 - DNA, 23 bp, Artificial Sequence
  LA337 primer
ctcatttgaatcagcttatggtg

SEQ ID NO: 305 - DNA, 24 bp, Artificial Sequence
  LA692 primer
ggaagtcattgacaccatcttggc

SEQ ID NO: 306 - DNA, 24 bp, Artificial Sequence
  LA693 primer
agaagctgggacagcagcgttagc

SEQ ID NO: 307 - DNA, 7523 bp, Artificial Sequence
  pLA34 plasmid
ccagcttttgttccctttagtgagggttaattgcgcgcttggcgtaatcatggtcatagctgtttcctgtgtgaaattgttatccgctcacaattccacacaacataggagccggaagcataaagtgtaaagcctggggtgcctaatgagtgaggtaactcacattaattgcgttgcgctcactgcccgctttccagtcgggaaacctgtcgtgccagctgcattaatgaatcggccaacgcgcggggagaggcggtttgcgtattgggcgctcttccgcttcctcgctcactgactcgctgcgctcggtcgttcggctgcggcgagcggtatcagctcactcaaaggcggtaatacggttatccacagaatcaggggataacgcaggaaagaacatgtgagcaaaaggccagcaaaaggccaggaaccgtaaaaaggccgcgttgctggcgtttttccataggctccgcccccctgacgagcatcacaaaaatcgacgctcaagtcagaggtggcgaaacccgacaggactataaagataccaggcgtttccccctggaagctccctcgtgcgctctcctgttccgaccctgccgcttaccggatacctgtccgcctttctcccttcgggaagcgtggcgctttctcatagctcacgctgtaggtatctcagttcggtgtaggtcgttcgctccaagctgggctgtgtgcacgaaccccccgttcagcccgaccgctgcgccttatccggtaactatcgtcttgagtccaacccggtaagacacgacttatcgccactggcagcagccactggtaacaggattagcagagcgaggtatgtaggcggtgctacagagttcttgaagtggtggcctaactacggctacactagaaggacagtatttggtatctgcgctctgctgaagccagttaccttcggaaaaagagttggtagctcttgatccggcaaacaaaccaccgctggtagcggtggtttttttgtttgcaagcagcagattacgcgcagaaaaaaaggatctcaagaagatcctttgatcttttctacggggtctgacgctcagtggaacgaaaactcacgttaagggattttggtcatgagattatcaaaaaggatcttcacctagatccttttaaattaaaaatgaagttttaaatcaatctaaagtatatatgagtaaacttggtctgacagttaccaatgcttaatcagtgaggcacctatctcagcgatctgtctatttcgttcatccatagttgcctgactccccgtcgtgtagataactacgatacgggagggcttaccatctggccccagtgctgcaatgataccgcgagacccacgctcaccggctccagatttatcagcaataaaccagccagccggaagggccgagcgcagaagtggtcctgcaactttatccgcctccatccagtctattaattgttgccgggaagctagagtaagtagttcgccagttaatagtttgcgcaacgttgttgccattgctacaggcatcgtggtgtcacgctcgtcgtttggtatggcttcattcagctccggttcccaacgatcaaggcgagttacatgatcccccatgttgtgcaaaaaagcggttagctccttcggtcctccgatcgttgtcagaagtaagttggccgcagtgttatcactcatggttatggcagcactgcataattctcttactgtcatgccatccgtaagatgcttttctgtgactggtgagtactcaaccaagtcattctgagaatagtgtatgcggcgaccgagttgctcttgcccggcgtcaatacgggataataccgcgccacatagcagaactttaaaagtgctcatcattggaaaacgttcttcggggcgaaaactctcaaggatcttaccgctgttgagatccagttcgatgtaacccactcgtgcacccaactgatcttcagcatcttttactttcaccagcgtttctgggtgagcaaaaacaggaaggcaaaatgccgcaaaaaagggaataagggcgacacggaaatgttgaatactcatactcttcctttttcaatattattgaagcatttatcagggttattgtctcatgagcggatacatatttgaatgtatttagaaaaataaacaaataggggttccgcgcacatttccccgaaaagtgccacctgaacgaagcatctgtgcttcattttgtagaacaaaaatgcaacgcgagagcgctaatttttcaaacaaagaatctgagctgcatttttacagaacagaaatgcaacgcgaaagcgctattttaccaacgaagaatctgtgcttcatttttgtaaaacaaaaatgcaacgcgagagcgctaatttttcaaacaaagaatctgagctgcatttttacagaacagaaatgcaacgcgagagcgctattttaccaacaaagaatctatacttcttttttgttctacaaaaatgcatcccgagagcgctatttttctaacaaagcatcttagattactttttttctcctttgtgcgctctataatgcagtctcttgataactttttgcactgtaggtccgttaaggttagaagaaggctactttggtgtctattttctcttccataaaaaaagcctgactccacttcccgcgtttactgattactagcgaagctgcgggtgcattttttcaagataaaggcatccccgattatattctataccgatgtggattgcgcatactttgtgaacagaaagtgatagcgttgatgattcttcattggtcagaaaattatgaacggtttcttctattttgtctctatatactacgtataggaaatgtttacattttcgtattgttttcgattcactctatgaatagttcttactacaatttttttgtctaaagagtaatactagagataaacataaaaaatgtagaggtcgagtttagatgcaagttcaaggagcgaaaggtggatgggtaggttatatagggatatagcacagagatatatagcaaagagatacttttgagcaatgtttgtggaagcggtattcgcaatattttagtagctcgttacagtccggtgcgtttttggttttttgaaagtgcgtcttcagagcgcttttggttttcaaaagcgctctgaagttcctatactttctagagaataggaacttcggaataggaacttcaaagcgtttccgaaaacgagcgcttccgaaaatgcaacgcgagctgcgcacatacagctcactgttcacgtcgcacctatatctgcgtgttgcctgtatatatatatacatgagaagaacggcatagtgcgtgtttatgcttaaatgcgtacttatatgcgtctatttatgtaggatgaaaggtagtctagtacctcctgtgatattatcccattccatgcggggtatcgtatgcttccttcagcactaccctttagctgttctatatgctgccactcctcaattggattagtctcatccttcaatgctatcatttcctttgatattggatcatctaagaaaccattattatcatgacattaacctataaaaataggcgtatcacgaggccctttcgtctcgcgcgtttcggtgatgacggtgaaaacctctgacacatgcagctcccggagacggtcacagcttgtctgtaagcggatgccgggagcagacaagcccgtcagggcgcgtcagcgggtgttggcgggtgtcggggctggcttaactatgcggcatcagagcagattgtactgagagtgcaccataaattcccgttttaagagcttggtgagcgctaggagtcactgccaggtatcgtttgaacacggcattagtcagggaagtcataacacagtcctttcccgcaattttctttttctattactcttggcctcctctagtacactctatatttttttatgcctcggtaatgattttcatttttttttttcccctagcggatgactctttttttttcttagcgattggcattatcacataatgaattatacattatataaagtaatgtgatttcttcgaagaatatactaaaaaatgagcaggcaagataaacgaaggcaaagatgacagagcagaaagccctagtaaagcgtattacaaatgaaaccaagattcagattgcgatctctttaaagggtggtcccctagcgatagagcactcgatcttcccagaaaaagaggcagaagcagtagcagaacaggccacacaatcgcaagtgattaacgtccacacaggtatagggtttctggaccatatgatacatgctctggccaagcattccggctggtcgctaatcgttgagtgcattggtgacttacacatagacgaccatcacaccactgaagactgcgggattgctctcggtcaagcttttaaagaggccctactggcgcgtggagtaaaaaggtttggatcaggatttgcgcctttggatgaggcactttccagagcggtggtagatctttcgaacaggccgtacgcagttgtcgaacttggtttgcaaagggagaaagtaggagatctctcttgcgagatgatcccgcattttcttgaaagctttgcagaggctagcagaattaccctccacgttgattgtctgcgaggcaagaatgatcatcaccgtagtgagagtgcgttcaaggctcttgcggttgccataagagaagccacctcgcccaatggtaccaacgatgttccctccaccaaaggtgttcttatgtagtgacaccgattatttaaagctgcagcatacgatatatatacatgtgtatatatgtatacctatgaatgtcagtaagtatgtatacgaacagtatgatactgaagatgacaaggtaatgcatcattctatacgtgtcattctgaacgaggcgcgctttccttttttctttttgctttttctttttttttctcttgaactcgacggatctatgcggtgtgaaataccgcacagatgcgtaaggagaaaataccgcatcaggaaattgtaaacgttaatattttgttaaaattcgcgttaaatttttgttaaatcagctcattttttaaccaataggccgaaatcggcaaaatcccttataaatcaaaagaatagaccgagatagggttgagtgttgttccagtttggaacaagagtccactattaaagaacgtggactccaacgtcaaagggcgaaaaaccgtctatcagggcgatggcccactacgtgaaccatcaccctaatcaagttttttggggtcgaggtgccgtaaagcactaaatcggaaccctaaagggagcccccgatttagagcttgacggggaaagccggcgaacgtggcgagaaaggaagggaagaaagcgaaaggagcgggcgctagggcgctggcaagtgtagcggtcacgctgcgcgtaaccaccacacccgccgcgcttaatgcgccgctacagggcgcgtcgcgccattcgccattcaggctgcgcaactgttgggaagggcgatcggtgcgggcctcttcgctattacgccagctggcgaaagggggatgtgctgcaaggcgattaagttgggtaacgccagggttttcccagtcacgacgttgtaaaacgacggccagtgagcgcgcgtaatacgactcactatagggcgaattgggtaccgggccccccctcgaggtattagaagccgccgagcgggcgacagccctccgacggaagactctcctccgtgcgtcctcgtcttcaccggtcgcgttcctgaaacgcagatgtgcctcgcgccgcactgctccgaacaataaagattctacaatactagcttttatggttatgaagaggaaaaattggcagtaacctggccccacaaaccttcaaattaacgaatcaaattaacaaccataggatgataatgcgattagttttttagccttatttctggggtaattaatcagcgaagcgatgatttttgatctattaacagatatataaatggaaaagctgcataaccactttaactaatactttcaacattttcagtttgtattacttcttattcaaatgtcataaaagtatcaacaaaaaattgttaatatacctctatactttaacgtcaaggagaaaaatgtccaatttactgcccgtacaccaaaatttgcctgcattaccggtcgatgcaacgagtgatgaggttcgcaagaacctgatggacatgttcagggatcgccaggcgttttctgagcatacctggaaaatgcttctgtccgtttgccggtcgtgggcggcatggtgcaagttgaataaccggaaatggtttcccgcagaacctgaagatgttcgcgattatcttctatatcttcaggcgcgcggtctggcagtaaaaactatccagcaacatttgggccagctaaacatgcttcatcgtcggtccgggctgccacgaccaagtgacagcaatgctgtttcactggttatgcggcggatccgaaaagaaaacgttgatgccggtgaacgtgcaaaacaggctctagcgttcgaacgcactgatttcgaccaggttcgttcactcatggaaaatagcgatcgctgccaggatatacgtaatctggcatttctggggattgcttataacaccctgttacgtatagccgaaattgccaggatcagggttaaagatatctcacgtactgacggtgggagaatgttaatccatattggcagaacgaaaacgctggttagcaccgcaggtgtagagaaggcacttagcctgggggtaactaaactggtcgagcgatggatttccgtctctggtgtagctgatgatccgaataactacctgttttgccgggtcagaaaaaatggtgttgccgcgccatctgccaccagccagctatcaactcgcgccctggaagggatttttgaagcaactcatcgattgatttacggcgctaaggatgactctggtcagagatacctggcctggtctggacacagtgcccgtgtcggagccgcgcgagatatggcccgcgctggagtttcaataccggagatcatgcaagctggtggctggaccaatgtaaatattgtcatgaactatatccgtaacctggatagtgaaacaggggcaatggtgcgcctgctggaagatggcgattaggagtaagcgaatttcttatgatttatgatttttattattaaataagttataaaaaaaataagtgtatacaaattttaaagtgactcttaggttttaaaacgaaaattcttattcttgagtaactctttcctgtaggtcaggttgctttctcaggtatagcatgaggtcgctcttattgaccacacctctaccggcatgccgagcaaatgcctgcaaatcgctccccatttcacccaattgtagatatgctaactccagcaatgagttgatgaatctcggtgtgtattttatgtcctcagaggacaacacctgtggtccgccaccgcggtggagct

SEQ ID NO: 308 - DNA, 96 bp, Artificial Sequence
  LA722 plasmid
tgccaattatttacctaaacatctataaccttcaaaagtaaaaaaatacacaaacgttgaatcatcaccttggctaactcgttgtatcatcactgg

SEQ ID NO: 309 - DNA, 80 bp, Artificial Sequence
  LA733 primer
cataatcaatctcaaagagaacaacacaatacaataacaagaagaacaaagcattgcggattacgtattctaatgttcag

SEQ ID NO: 310 - DNA, 30 bp, Artificial Sequence
  LA453 primer
caccgaagaagaatgcaaaaatttcagctc

SEQ ID NO: 311 - DNA, 25 bp, Artificial Sequence
  LA694 primer
gctgaagttgttagaactgttgttg

SEQ ID NO: 312 - DNA, 21 bp, Artificial Sequence
  LA695 primer
tgttagctggagtagacttgg

SEQ ID NO: 313 - DNA, 22 bp, Artificial Sequence
  oBP594 primer
agctgtctcgtgttgtgggttt

SEQ ID NO: 314 - DNA, 49 bp, Artificial Sequence
  oBP595 primer
cttaataatagaacaatatcatcctttacgggcatcttatagtgtcgtt

SEQ ID NO: 315 - DNA, 49 bp, Artificial Sequence
  oBP596 primer
gcgccaacgacactataagatgcccgtaaaggatgatattgttctatta

SEQ ID NO: 316 - DNA, 49 bp, Artificial Sequence
  oBP597 primer
tatggaccctgaaaccacagccacattgcaacgacgacaatgccaaacc

SEQ ID NO: 317 - DNA, 49 bp, Artificial Sequence
  oBP598 primer
tccttggtttggcattgtcgtcgttgcaatgtggctgtggtttcagggt

SEQ ID NO: 318 - DNA, 49 bp, Artificial Sequence
  oBP599 primer
atcctctcgcggagtccctgttcagtaaaggccatgaagctttttcttt

SEQ ID NO: 319 - DNA, 49 bp, Artificial Sequence
  oBP600 primer
attggaaagaaaaagcttcatggcctttactgaacagggactccgcgag

SEQ ID NO: 320 - DNA, 22 bp, Artificial Sequence
  oBP601 primer
tcataccacaatcttagaccat

SEQ ID NO: 321 - DNA, 22 bp, Artificial Sequence
  oBP603 primer
tgttcccacaatctattaccta

SEQ ID NO: 322 - DNA, 31 bp, Artificial Sequence
  LA811 primer
aacgaagcatctgtgcttcattttgtagaac

SEQ ID NO: 323 - DNA, 59 bp, Artificial Sequence
  LA817 primer
cgatccacttgtatatttggatgaatttttgaggaattctgaaccagtcctaaaacgag

SEQ ID NO: 324 - DNA, 31 bp, Artificial Sequence
  LA812 primer
aacaaagatatgctattgaagtgcaagatgg

SEQ ID NO: 325 - DNA, 33 bp, Artificial Sequence
  LA818 primer
ctcaaaaattcatccaaatatacaagtggatcg

SEQ ID NO: 326 - DNA, 90 bp, Artificial Sequence
  LA512 primer
gtattttggtagattcaattctctttccctttccttttccttcgctccccttccttatcagcattgcggattacgtattctaatgttcag

SEQ ID NO: 327 - DNA, 90 bp, Artificial Sequence
  LA513 primer
ttggttgggggaaaaagaggcaacaggaaagatcagagggggagggggggggagagtgtcaccttggctaactcgttgtatcatcactgg

SEQ ID NO: 328 - DNA, 29 bp, Artificial Sequence
  LA516 primer
ctcgaaacaataagacgacgatggctctg

SEQ ID NO: 329 - DNA, 30 bp, Artificial Sequence
  LA514 primer
cactatctggtgcaaacttggcaccggaag

SEQ ID NO: 330 - DNA, 29 bp, Artificial Sequence
  LA515 primer
tgtttgtagccactcgtgaacttctctgc

SEQ ID NO: 331 - DNA, 6903 bp, Artificial Sequence
  pLA71 plasmid
aaacgccagcaacgcggcctttttacggttcctggccttttgctggccttttgctcacatgttctttcctgcgttatcccctgattctgtggataaccgtattaccgcctttgagtgagctgataccgctcgccgcagccgaacgaccgagcgcagcgagtcagtgagcgaggaagcggaagagcgcccaatacgcaaaccgcctctccccgcgcgttggccgattcattaatgcagctggcacgacaggtttcccgactggaaagcgggcagtgagcgcaacgcaattaatgtgagttagctcactcattaggcaccccaggctttacactttatgcttccggctcgtatgttgtgtggaattgtgagcggataacaatttcacacaggaaacagctatgaccatgattacgccaagcttgcatgcgatctgaaatgaataacaatactgacagtagatctgaaatgaataacaatactgacagtactaaataattgcctacttggcttcacatacgttgcatacgtcgatatagataataatgataatgacagcaggattatcgtaatacgtaatagttgaaaatctcaaaaatgtgtgggtcattacgtaaataatgataggaatgggattcttctatttttcctttttccattctagcagccgtcgggaaaacgtggcatcctctctttcgggctcaattggagtcacgctgccgtgagcatcctctctttccatatctaacaactgagcacgtaaccaatggaaaagcatgagcttagcgttgctccaaaaaagtattggatggttaataccatttgtctgttctcttctgactttgactcctcaaaaaaaaaaaatctacaatcaacagatcgcttcaattacgccctcacaaaaacttttttccttcttcttcgcccacgttaaattttatccctcatgttgtctaacggatttctgcacttgatttattataaaaagacaaagacataatacttctctatcaatttcagttattgttcttccttgcgttattcttctgttcttctttttcttttgtcatatataaccataaccaagtaatacatattcaaatctagagctgaggatgttgacaaaagcaacaaaagaacaaaaatcccttgtgaaaaacagaggggcggagcttgttgttgattgcttagtggagcaaggtgtcacacatgtatttggcattccaggtgcaaaaattgatgcggtatttgacgctttacaagataaaggacctgaaattatcgttgcccggcacgaacaaaacgcagcattcatggcccaagcagtcggccgtttaactggaaaaccgggagtcgtgttagtcacatcaggaccgggtgcctctaacttggcaacaggcctgctgacagcgaacactgaaggagaccctgtcgttgcgcttgctggaaacgtgatccgtgcagatcgtttaaaacggacacatcaatctttggataatgcggcgctattccagccgattacaaaatacagtgtagaagttcaagatgtaaaaaatataccggaagctgttacaaatgcatttaggatagcgtcagcagggcaggctggggccgcttttgtgagctttccgcaagatgttgtgaatgaagtcacaaatacgaaaaacgtgcgtgctgttgcagcgccaaaactcggtcctgcagcagatgatgcaatcagtgcggccatagcaaaaatccaaacagcaaaacttcctgtcgttttggtcggcatgaaaggcggaagaccggaagcaattaaagcggttcgcaagcttttgaaaaaggttcagcttccatttgttgaaacatatcaagctgccggtaccctttctagagatttagaggatcaatattttggccgtatcggtttgttccgcaaccagcctggcgatttactgctagagcaggcagatgttgttctgacgatcggctatgacccgattgaatatgatccgaaattctggaatatcaatggagaccggacaattatccatttagacgagattatcgctgacattgatcatgcttaccagcctgatcttgaattgatcggtgacattccgtccacgatcaatcatatcgaacacgatgctgtgaaagtggaatttgcagagcgtgagcagaaaatcctttctgatttaaaacaatatatgcatgaaggtgagcaggtgcctgcagattggaaatcagacagagcgcaccctcttgaaatcgttaaagagttgcgtaatgcagtcgatgatcatgttacagtaacttgcgatatcggttcgcacgccatttggatgtcacgttatttccgcagctacgagccgttaacattaatgatcagtaacggtatgcaaacactcggcgttgcgcttccttgggcaatcggcgcttcattggtgaaaccgggagaaaaagtggtttctgtctctggtgacggcggtttcttattctcagcaatggaattagagacagcagttcgactaaaagcaccaattgtacacattgtatggaacgacagcacatatgacatggttgcattccagcaattgaaaaaatataaccgtacatctgcggtcgatttcggaaatatcgatatcgtgaaatatgcggaaagcttcggagcaactggcttgcgcgtagaatcaccagaccagctggcagatgttctgcgtcaaggcatgaacgctgaaggtcctgtcatcatcgatgtcccggttgactacagtgataacattaatttagcaagtgacaagcttccgaaagaattcggggaactcatgaaaacgaaagctctctagttaattaatcatgtaattagttatgtcacgcttacattcacgccctccccccacatccgctctaaccgaaaaggaaggagttagacaacctgaagtctaggtccctatttatttttttatagttatgttagtattaagaacgttatttatatttcaaatttttcttttttttctgtacagacgcgtgtacgcatgtaacattatactgaaaaccttgcttgagaaggttttgggacgctcgaaggctttaatttaggttttgggacgctcgaaggctttaatttggatccgcattgcggattacgtattctaatgttcagtaccgttcgtataatgtatgctatacgaagttatgcagattgtactgagagtgcaccataccacagcttttcaattcaattcatcattttttttttattcttttttttgatttcggtttctttgaaatttttttgattcggtaatctccgaacagaaggaagaacgaaggaaggagcacagacttagattggtatatatacgcatatgtagtgttgaagaaacatgaaattgcccagtattcttaacccaactgcacagaacaaaaacctgcaggaaacgaagataaatcatgtcgaaagctacatataaggaacgtgctgctactcatcctagtcctgttgctgccaagctatttaatatcatgcacgaaaagcaaacaaacttgtgtgcttcattggatgttcgtaccaccaaggaattactggagttagttgaagcattaggtcccaaaatttgtttactaaaaacacatgtggatatcttgactgatttttccatggagggcacagttaagccgctaaaggcattatccgccaagtacaattttttactcttcgaagacagaaaatttgctgacattggtaatacagtcaaattgcagtactctgcgggtgtatacagaatagcagaatgggcagacattacgaatgcacacggtgtggtgggcccaggtattgttagcggtttgaagcaggcggcagaagaagtaacaaaggaacctagaggccttttgatgttagcagaattgtcatgcaagggctccctatctactggagaatatactaagggtactgttgacattgcgaagagcgacaaagattttgttatcggctttattgctcaaagagacatgggtggaagagatgaaggttacgattggttgattatgacacccggtgtgggtttagatgacaagggagacgcattgggtcaacagtatagaaccgtggatgatgtggtctctacaggatctgacattattattgttggaagaggactatttgcaaagggaagggatgctaaggtagagggtgaacgttacagaaaagcaggctgggaagcatatttgagaagatgcggccagcaaaactaaaaaactgtattataagtaaatgcatgtatactaaactcacaaattagagcttcaatttaattatatcagttattaccctatgcggtgtgaaataccgcacagatgcgtaaggagaaaataccgcatcaggaaattgtaaacgttaatattttgttaaaattcgcgttaaatttttgttaaatcagctcattttttaaccaataggccgaaatcggcaaaatcccttataaatcaaaagaatagaccgagatagggttgagtgttgttccagtttggaacaagagtccactattaaagaacgtggactccaacgtcaaagggcgaaaaaccgtctatcagggcgatggcccactacgtgaaccatcaccctaatcaagataacttcgtataatgtatgctatacgaacggtaccagtgatgatacaacgagttagccaaggtgaattcactggccgtcgttttacaacgtcgtgactgggaaaaccctggcgttacccaacttaatcgccttgcagcacatccccctttcgccagctggcgtaatagcgaagaggcccgcaccgatcgcccttcccaacagttgcgcagcctgaatggcgaatggcgcctgatgcggtattttctccttacgcatctgtgcggtatttcacaccgcatatggtgcactctcagtacaatctgctctgatgccgcatagttaagccagccccgacacccgccaacacccgctgacgcgccctgacgggcttgtctgctcccggcatccgcttacagacaagctgtgaccgtctccgggagctgcatgtgtcagaggttttcaccgtcatcaccgaaacgcgcgagacgaaagggcctcgtgatacgcctatttttataggttaatgtcatgataataatggtttcttagacgtcaggtggcacttttcggggaaatgtgcgcggaacccctatttgtttatttttctaaatacattcaaatatgtatccgctcatgagacaataaccctgataaatgcttcaataatattgaaaaaggaagagtatgagtattcaacatttccgtgtcgcccttattcccttttttgcggcattttgccttcctgtttttgctcacccagaaacgctggtgaaagtaaaagatgctgaagatcagttgggtgcacgagtgggttacatcgaactggatctcaacagcggtaagatccttgagagttttcgccccgaagaacgttttccaatgatgagcacttttaaagttctgctatgtggcgcggtattatcccgtattgacgccgggcaagagcaactcggtcgccgcatacactattctcagaatgacttggttgagtactcaccagtcacagaaaagcatcttacggatggcatgacagtaagagaattatgcagtgctgccataaccatgagtgataacactgcggccaacttacttctgacaacgatcggaggaccgaaggagctaaccgcttttttgcacaacatgggggatcatgtaactcgccttgatcgttgggaaccggagctgaatgaagccataccaaacgacgagcgtgacaccacgatgcctgtagcaatggcaacaacgttgcgcaaactattaactggcgaactacttactctagcttcccggcaacaattaatagactggatggaggcggataaagttgcaggaccacttctgcgctcggcccttccggctggctggtttattgctgataaatctggagccggtgagcgtgggtctcgcggtatcattgcagcactggggccagatggtaagccctcccgtatcgtagttatctacacgacggggagtcaggcaactatggatgaacgaaatagacagatcgctgagataggtgcctcactgattaagcattggtaactgtcagaccaagtttactcatatatactttagattgatttaaaacttcatttttaatttaaaaggatctaggtgaagatcctttttgataatctcatgaccaaaatcccttaacgtgagttttcgttccactgagcgtcagaccccgtagaaaagatcaaaggatcttcttgagatcctttttttctgcgcgtaatctgctgcttgcaaacaaaaaaaccaccgctaccagcggtggtttgtttgccggatcaagagctaccaactctttttccgaaggtaactggcttcagcagagcgcagataccaaatactgtccttctagtgtagccgtagttaggccaccacttcaagaactctgtagcaccgcctacatacctcgctctgctaatcctgttaccagtggctgctgccagtggcgataagtcgtgtcttaccgggttggactcaagacgatagttaccggataaggcgcagcggtcgggctgaacggggggttcgtgcacacagcccagcttggagcgaacgacctacaccgaactgagatacctacagcgtgagctatgagaaagcgccacgcttcccgaagggagaaaggcggacaggtatccggtaagcggcagggtcggaacaggagagcgcacgagggagcttccagggggaaacgcctggtatctttatagtcctgtcgggtttcgccacctctgacttgagcgtcgatttttgtgatgctcgtcaggggggcggagcctatggaa

SEQ ID NO: 332 - DNA, 96 bp, Artificial Sequence
  LA829 primer
ccaaatttacaatatctcctgaattcttggcttggaatatgggcagtacagcttgtgtgatattgcaccttggctaactcgttgtatcatcactgg

SEQ ID NO: 333 - DNA, 90 bp, Artificial Sequence
  LA834 primer
atgtcccaaggtagaaaagctgcagaaagattggctaagaagactgtcctcattacaggtgatctgaaatgaataacaatactgacagta

SEQ ID NO: 334 - DNA, 22 bp, Artificial Sequence
  LA740 primer
cgataatcctgctgtcattatc

SEQ ID NO: 335 - DNA, 29 bp, Artificial Sequence
  LA830 primer
cacggcaaacttagaggcacaatagatag

SEQ ID NO: 336 - DNA, 22 bp, Artificial Sequence
  LA92 primer
gagaagatgcggccagcaaaac

SEQ ID NO: 337 - DNA, 6924 bp, Artificial Sequence
  pLA78 plasmid
gatccgcattgcggattacgtattctaatgttcagtaccgttcgtataatgtatgctatacgaagttatgcagattgtactgagagtgcaccataccaccttttcaattcatcattttttttttattcttttttttgatttcggtttccttgaaatttttttgattcggtaatctccgaacagaaggaagaacgaaggaaggagcacagacttagattggtatatatacgcatatgtagtgttgaagaaacatgaaattgcccagtattcttaacccaactgcacagaacaaaaacctgcaggaaacgaagataaatcatgtcgaaagctacatataaggaacgtgctgctactcatcctagtcctgttgctgccaagctatttaatatcatgcacgaaaagcaaacaaacttgtgtgcttcattggatgttcgtaccaccaaggaattactggagttagttgaagcattaggtcccaaaatttgtttactaaaaacacatgtggatatcttgactgatttttccatggagggcacagttaagccgctaaaggcattatccgccaagtacaattttttactcttcgaagacagaaaatttgctgacattggtaatacagtcaaattgcagtactctgcgggtgtatacagaatagcagaatgggcagacattacgaatgcacacggtgtggtgggcccaggtattgttagcggtttgaagcaggcggcagaagaagtaacaaaggaacctagaggccttttgatgttagcagaattgtcatgcaagggctccctatctactggagaatatactaagggtactgttgacattgcgaagagcgacaaagattttgttatcggctttattgctcaaagagacatgggtggaagagatgaaggttacgattggttgattatgacacccggtgtgggtttagatgacaagggagacgcattgggtcaacagtatagaaccgtggatgatgtggtctctacaggatctgacattattattgttggaagaggactatttgcaaagggaagggatgctaaggtagagggtgaacgttacagaaaagcaggctgggaagcatatttgagaagatgcggccagcaaaactaaaaaactgtattataagtaaatgcatgtatactaaactcacaaattagagcttcaatttaattatatcagttattaccctatgcggtgtgaaataccgcacagatgcgtaaggagaaaataccgcatcaggaaattgtaaacgttaatattttgttaaaattcgcgttaaatttttgttaaatcagctcattttttaaccaataggccgaaatcggcaaaatcccttataaatcaaaagaatagaccgagatagggttgagtgttgttccagtttggaacaagagtccactattaaagaacgtggactccaacgtcaaagggcgaaaaaccgtctatcagggcgatggcccactacgtgaaccatcaccctaatcaagataacttcgtataatgtatgctatacgaacggtaccagtgatgatacaacgagttagccaaggtgaattcactggccgtcgttttacaacgtcgtgactgggaaaaccctggcgttacccaacttaatcgccttgcagcacatccccctttcgccagctggcgtaatagcgaagaggcccgcaccgatcgcccttcccaacagttgcgcagcctgaatggcgaatggcgcctgatgcggtattttctccttacgcatctgtgcggtatttcacaccgcatatggtgcactctcagtacaatctgctctgatgccgcatagttaagccagccccgacacccgccaacacccgctgacgcgccctgacgggcttgtctgctcccggcatccgcttacagacaagctgtgaccgtctccgggagctgcatgtgtcagaggttttcaccgtcatcaccgaaacgcgcgagacgaaagggcctcgtgatacgcctatttttataggttaatgtcatgataataatggtttcttagacgtcaggtggcacttttcggggaaatgtgcgcggaacccctatttgtttatttttctaaatacattcaaatatgtatccgctcatgagacaataaccctgataaatgcttcaataatattgaaaaaggaagagtatgagtattcaacatttccgtgtcgcccttattcccttttttgcggcattttgccttcctgtttttgctcacccagaaacgctggtgaaagtaaaagatgctgaagatcagttgggtgcacgagtgggttacatcgaactggatctcaacagcggtaagatccttgagagttttcgccccgaagaacgttttccaatgatgagcacttttaaagttctgctatgtggcgcggtattatcccgtattgacgccgggcaagagcaactcggtcgccgcatacactattctcagaatgacttggttgagtactcaccagtcacagaaaagcatcttacggatggcatgacagtaagagaattatgcagtgctgccataaccatgagtgataacactgcggccaacttacttctgacaacgatcggaggaccgaaggagctaaccgcttttttgcacaacatgggggatcatgtaactcgccttgatcgttgggaaccggagctgaatgaagccataccaaacgacgagcgtgacaccacgatgcctgtagcaatggcaacaacgttgcgcaaactattaactggcgaactacttactctagcttcccggcaacaattaatagactggatggaggcggataaagttgcaggaccacttctgcgctcggcccttccggctggctggtttattgctgataaatctggagccggtgagcgtgggtctcgcggtatcattgcagcactggggccagatggtaagccctcccgtatcgtagttatctacacgacggggagtcaggcaactatggatgaacgaaatagacagatcgctgagataggtgcctcactgattaagcattggtaactgtcagaccaagtttactcatatatactttagattgatttaaaacttcatttttaatttaaaaggatctaggtgaagatcctttttgataatctcatgaccaaaatcccttaacgtgagttttcgttccactgagcgtcagaccccgtagaaaagatcaaaggatcttcttgagatcctttttttctgcgcgtaatctgctgcttgcaaacaaaaaaaccaccgctaccagcggtggtttgtttgccggatcaagagctaccaactctttttccgaaggtaactggcttcagcagagcgcagataccaaatactgtccttctagtgtagccgtagttaggccaccacttcaagaactctgtagcaccgcctacatacctcgctctgctaatcctgttaccagtggctgctgccagtggcgataagtcgtgtcttaccgggttggactcaagacgatagttaccggataaggcgcagcggtcgggctgaacggggggttcgtgcacacagcccagcttggagcgaacgacctacaccgaactgagatacctacagcgtgagctatgagaaagcgccacgcttcccgaagggagaaaggcggacaggtatccggtaagcggcagggtcggaacaggagagcgcacgagggagcttccagggggaaacgcctggtatctttatagtcctgtcgggtttcgccacctctgacttgagcgtcgatttttgtgatgctcgtcaggggggcggagcctatggaaaaacgccagcaacgcggcctttttacggttcctggccttttgctggccttttgctcacatgttctttcctgcgttatcccctgattctgtggataaccgtattaccgcctttgagtgagctgataccgctcgccgcagccgaacgaccgagcgcagcgagtcagtgagcgaggaagcggaagagcgcccaatacgcaaaccgcctctccccgcgcgttggccgattcattaatgcagctggcacgacaggtttcccgactggaaagcgggcagtgagcgcaacgcaattaatgtgagttagctcactcattaggcaccccaggctttacactttatgcttccggctcgtatgttgtgtggaattgtgagcggataacaatttcacacaggaaacagctatgaccatgattacgccaagcttccaattaccgtcgctcgtgatttgtttgcaaaaagaacaaaactgaaaaaacccagacacgctcgacttcctgtcttcctattgattgcagcttccaatttcgtcacacaacaaggtcctgtcgacgcctacttggcttcacatacgttgcatacgtcgatatagataataatgataatgacagcaggattatcgtaatacgtaatagttgaaaatctcaaaaatgtgtgggtcattacgtaaataatgataggaatgggattcttctatttttcctttttccattctagcagccgtcgggaaaacgtggcatcctctctttcgggctcaattggagtcacgctgccgtgagcatcctctctttccatatctaacaactgagcacgtaaccaatggaaaagcatgagcttagcgttgctccaaaaaagtattggatggttaataccatttgtctgttctcttctgactttgactcctcaaaaaaaaaaaatctacaatcaacagatcgcttcaattacgccctcacaaaaacttttttccttcttcttcgcccacgttaaattttatccctcatgttgtctaacggatttctgcacttgatttattataaaaagacaaagacataatacttctctatcaatttcagttattgttcttccttgcgttattcttctgttcttctttttcttttgtcatatataaccataaccaagtaatacatattcaagtttaaacatgtataccgtaggacagtacttggtagatagactagaagagattggtatcgataaggttttcggtgtgccaggggattacaatttgacttttctagattacattcaaaatcacgaaggactttcctggcaagggaatactaatgaactaaacgcagcatatgcagcagatggctacgcccgtgaaagaggcgtatcagctcttgttactacattcggagtgggtgaactgtcagccattaacggaacagctggtagttttgcagaacaagtccctgtcatccacatcgtgggttctccaactatgaatgtgcaatccaacaaaaagctggttcatcattccttaggaatgggtaactttcataactttagtgaaatggctaaggaagtcactgccgctacaaccatgcttactgaagagaatgcagcttcagagatcgacagagtattagaaacagccttgttggaaaagaggccagtatacatcaatcttccaattgatatagctcataaagcaatagttaaacctgcaaaagcactacaaacagagaaatcatctggtgagagagaggcacaacttgcagaaatcatactatcacacttagaaaaggccgctcaacctatcgtaatcgccggtcatgagatcgcccgtttccagataagagaaagatttgaaaactggataaaccaaacaaagttgccagtaaccaatttggcatatggcaaaggctctttcaatgaagagaacgaacatttcattggtacctattacccagctttttctgacaaaaacgttctggattacgttgacaatagtgacttcgttttacattttggtgggaaaatcattgacaattctacctcctcattttctcaaggctttaagactgaaaacactttaaccgctgcaaatgacatcattatgctgccagatgggtctacttactctgggatttctcttaacggtcttttggcagagctggaaaaactaaactttacttttgctgatactgctgctaaacaagctgaattagctgttttcgaaccacaggccgaaacaccactaaagcaagacagatttcaccaagctgttatgaactttttgcaagctgatgatgtgttggtcactgagcaggggacatcatctttcggtttgatgttggcacctctgaaaaagggtatgaatttgatcagtcaaacattatggggctccataggatacacattacctgctatgattggttcacaaattgctgccccagaaaggagacacattctatccatcggtgatggatcttttcaactgacagcacaggaaatgtccaccatcttcagagagaaattgacaccagtgatattcattatcaataacgatggctatacagtcgaaagagccatccatggagaggatgagagttacaatgatataccaacttggaacttgcaattagttgctgaaacatttggtggtgatgccgaaactgtcgacactcacaacgttttcacagaaacagacttcgctaatactttagctgctatcgatgctactcctcaaaaagcacatgtcgttgaagttcatatggaacaaatggatatgccagaatcattgagacagattggcttagccttatctaagcaaaactcttaagtttaaactaagcgaatttcttatgatttatgatttttattattaaataagttataaaaaaaataagtgtatacaaattttaaagtgactcttaggttttaaaacgaaaattcttattcttgagtaactctttcctgtaggtcaggttgctttctcaggtatagcatgaggtcgctcttattgaccacacctctaccggcatgccgagcaaatgcctgcaaatcgctccccatttcacccaattgtagatatgctaactccagcaatgagttgatgaatctcggtgtgtattttatgtcctcagaggacaacacctgttgtaatcgttcttccacacg

SEQ ID NO: 338 - DNA, 92 bp, Artificial Sequence
  LA850 primer
atgactaagctacactttgacactgctgaaccagtcaagatcacacttccaaatggtttgacataaattaccgtcgctcgtgatttgtttgc

SEQ ID NO: 339 - DNA, 94 bp, Artificial Sequence
  LA851 primer
ttacaacttaattctgacagcttttacttcagtgtatgcatggtagacttcttcacccatttccaccttggctaactcgttgtatcatcactgg

SEQ ID NO: 340 - DNA, 24 bp, Artificial Sequence
  N1262 primer
cacgtaagggcatgatagaattgg

SEQ ID NO: 341 - DNA, 26 bp, Artificial Sequence
  N1263 primer
ggatatagcagttgttgtacactagc

SEQ ID NO: 342 - DNA, 6761 bp, Artificial Sequence
  pLA65 plasmid
gatccgcattgcggattacgtattctaatgttcagtaccgttcgtataatgtatgctatacgaagttatgcagattgtactgagagtgcaccataccaccttttcaattcatcattttttttttattcttttttttgatttcggtttccttgaaatttttttgattcggtaatctccgaacagaaggaagaacgaaggaaggagcacagacttagattggtatatatacgcatatgtagtgttgaagaaacatgaaattgcccagtattcttaacccaactgcacagaacaaaaacctgcaggaaacgaagataaatcatgtcgaaagctacatataaggaacgtgctgctactcatcctagtcctgttgctgccaagctatttaatatcatgcacgaaaagcaaacaaacttgtgtgcttcattggatgttcgtaccaccaaggaattactggagttagttgaagcattaggtcccaaaatttgtttactaaaaacacatgtggatatcttgactgatttttccatggagggcacagttaagccgctaaaggcattatccgccaagtacaattttttactcttcgaagacagaaaatttgctgacattggtaatacagtcaaattgcagtactctgcgggtgtatacagaatagcagaatgggcagacattacgaatgcacacggtgtggtgggcccaggtattgttagcggtttgaagcaggcggcagaagaagtaacaaaggaacctagaggccttttgatgttagcagaattgtcatgcaagggctccctatctactggagaatatactaagggtactgttgacattgcgaagagcgacaaagattttgttatcggctttattgctcaaagagacatgggtggaagagatgaaggttacgattggttgattatgacacccggtgtgggtttagatgacaagggagacgcattgggtcaacagtatagaaccgtggatgatgtggtctctacaggatctgacattattattgttggaagaggactatttgcaaagggaagggatgctaaggtagagggtgaacgttacagaaaagcaggctgggaagcatatttgagaagatgcggccagcaaaactaaaaaactgtattataagtaaatgcatgtatactaaactcacaaattagagcttcaatttaattatatcagttattaccctatgcggtgtgaaataccgcacagatgcgtaaggagaaaataccgcatcaggaaattgtaaacgttaatattttgttaaaattcgcgttaaatttttgttaaatcagctcattttttaaccaataggccgaaatcggcaaaatcccttataaatcaaaagaatagaccgagatagggttgagtgttgttccagtttggaacaagagtccactattaaagaacgtggactccaacgtcaaagggcgaaaaaccgtctatcagggcgatggcccactacgtgaaccatcaccctaatcaagataacttcgtataatgtatgctatacgaacggtaccagtgatgatacaacgagttagccaaggtgaattcactggccgtcgttttacaacgtcgtgactgggaaaaccctggcgttacccaacttaatcgccttgcagcacatccccctttcgccagctggcgtaatagcgaagaggcccgcaccgatcgcccttcccaacagttgcgcagcctgaatggcgaatggcgcctgatgcggtattttctccttacgcatctgtgcggtatttcacaccgcatatggtgcactctcagtacaatctgctctgatgccgcatagttaagccagccccgacacccgccaacacccgctgacgcgccctgacgggcttgtctgctcccggcatccgcttacagacaagctgtgaccgtctccgggagctgcatgtgtcagaggttttcaccgtcatcaccgaaacgcgcgagacgaaagggcctcgtgatacgcctatttttataggttaatgtcatgataataatggtttcttagacgtcaggtggcacttttcggggaaatgtgcgcggaacccctatttgtttatttttctaaatacattcaaatatgtatccgctcatgagacaataaccctgataaatgcttcaataatattgaaaaaggaagagtatgagtattcaacatttccgtgtcgcccttattcccttttttgcggcattttgccttcctgtttttgctcacccagaaacgctggtgaaagtaaaagatgctgaagatcagttgggtgcacgagtgggttacatcgaactggatctcaacagcggtaagatccttgagagttttcgccccgaagaacgttttccaatgatgagcacttttaaagttctgctatgtggcgcggtattatcccgtattgacgccgggcaagagcaactcggtcgccgcatacactattctcagaatgacttggttgagtactcaccagtcacagaaaagcatcttacggatggcatgacagtaagagaattatgcagtgctgccataaccatgagtgataacactgcggccaacttacttctgacaacgatcggaggaccgaaggagctaaccgcttttttgcacaacatgggggatcatgtaactcgccttgatcgttgggaaccggagctgaatgaagccataccaaacgacgagcgtgacaccacgatgcctgtagcaatggcaacaacgttgcgcaaactattaactggcgaactacttactctagcttcccggcaacaattaatagactggatggaggcggataaagttgcaggaccacttctgcgctcggcccttccggctggctggtttattgctgataaatctggagccggtgagcgtgggtctcgcggtatcattgcagcactggggccagatggtaagccctcccgtatcgtagttatctacacgacggggagtcaggcaactatggatgaacgaaatagacagatcgctgagataggtgcctcactgattaagcattggtaactgtcagaccaagtttactcatatatactttagattgatttaaaacttcatttttaatttaaaaggatctaggtgaagatcctttttgataatctcatgaccaaaatcccttaacgtgagttttcgttccactgagcgtcagaccccgtagaaaagatcaaaggatcttcttgagatcctttttttctgcgcgtaatctgctgcttgcaaacaaaaaaaccaccgctaccagcggtggtttgtttgccggatcaagagctaccaactctttttccgaaggtaactggcttcagcagagcgcagataccaaatactgtccttctagtgtagccgtagttaggccaccacttcaagaactctgtagcaccgcctacatacctcgctctgctaatcctgttaccagtggctgctgccagtggcgataagtcgtgtcttaccgggttggactcaagacgatagttaccggataaggcgcagcggtcgggctgaacggggggttcgtgcacacagcccagcttggagcgaacgacctacaccgaactgagatacctacagcgtgagctatgagaaagcgccacgcttcccgaagggagaaaggcggacaggtatccggtaagcggcagggtcggaacaggagagcgcacgagggagcttccagggggaaacgcctggtatctttatagtcctgtcgggtttcgccacctctgacttgagcgtcgatttttgtgatgctcgtcaggggggcggagcctatggaaaaacgccagcaacgcggcctttttacggttcctggccttttgctggccttttgctcacatgttctttcctgcgttatcccctgattctgtggataaccgtattaccgcctttgagtgagctgataccgctcgccgcagccgaacgaccgagcgcagcgagtcagtgagcgaggaagcggaagagcgcccaatacgcaaaccgcctctccccgcgcgttggccgattcattaatgcagctggcacgacaggtttcccgactggaaagcgggcagtgagcgcaacgcaattaatgtgagttagctcactcattaggcaccccaggctttacactttatgcttccggctcgtatgttgtgtggaattgtgagcggataacaatttcacacaggaaacagctatgaccatgattacgccaagcttacctggtaaaacctctagtggagtagtagatgtaatcaatgaagcggaagccaaaagaccagagtagaggcctatagaagaaactgcgataccttttgtgatggctaaacaaacagacatctttttatatgtttttacttctgtatatcgtgaagtagtaagtgataagcgaatttggctaagaacgttgtaagtgaacaagggacctcttttgcctttcaaaaaaggattaaatggagttaatcattgagatttagttttcgttagattctgtatccctaaataactcccttacccgacgggaaggcacaaaagacttgaataatagcaaacggccagtagccaagaccaaataatactagagttaactgatggtcttaaacaggcattacgtggtgaactccaagaccaatatacaaaatatcgataagttattcttgcccaccaatttaaggagcctacatcaggacagtagtaccattcctcagagaagaggtatacataacaagaaaatcgcgtgaacaccttatataacttagcccgttattgagctaaaaaaccttgcaaaatttcctatgaataagaatacttcagacgtgataaaaatttactttctaactcttctcacgctgcccctatctgttcttccgctctaccgtgagaaataaagcatcgagtacggcagttcgctgtcactgaactaaaacaataaggctagttcgaatgatgaacttgcttgctgtcaaacttctgagttgccgctgatgtgacactgtgacaataaattcaaaccggttatagcggtctcctccggtaccggttctgccacctccaatagagctcagtaggagtcagaacctctgcggtggctgtcagtgactcatccgcgtttcgtaagttgtgcgcgtgcacatttcgcccgttcccgctcatcttgcagcaggcggaaattttcatcacgctgtaggacgcaaaaaaaaaataattaatcgtacaagaatcttggaaaaaaaattgaaaaattttgtataaaagggatgacctaacttgactcaatggcttttacacccagtattttccctttccttgtttgttacaattatagaagcaagacaaaaacatatagacaacctattcctaggagttatatttttttaccctaccagcaatataagtaaaaaactgtttatgaaagcattagtgtataggggcccaggccagaagttggtggaagagagacagaagccagagcttaaggaacctggtgacgctatagtgaaggtaacaaagactacaatttgcggaaccgatctacacattcttaaaggtgacgttgcgacttgtaaacccggtcgtgtattagggcatgaaggagtgggggttattgaatcagtcggatctggggttactgctttccaaccaggcgatagagttttgatatcatgtatatcgagttgcggaaagtgctcattttgtagaagaggaatgttcagtcactgtacgaccgggggttggattctgggcaacgaaattgatggtacccaagcagagtacgtaagagtaccacatgctgacacatccctttatcgtattccggcaggtgcggatgaagaggccttagtcatgttatcagatattctaccaacgggttttgagtgcggagtcctaaacggcaaagtcgcacctggttcttcggtggctatagtaggtgctggtcccgttggtttggccgccttactgacagcacaattctactccccagctgaaatcataatgatcgatcttgatgataacaggctgggattagccaaacaatttggtgccaccagaacagtaaactccacgggtggtaacgccgcagccgaagtgaaagctcttactgaaggcttaggtgttgatactgcgattgaagcagttgggatacctgctacatttgaattgtgtcagaatatcgtagctcccggtggaactatcgctaatgtcggcgttcacggtagcaaagttgatttgcatcttgaaagtttatggtcccataatgtcacgattactacaaggttggttgacacggctaccaccccgatgttactgaaaactgttcaaagtcacaagctagatccatctagattgataacacatagattcagcctggaccagatcttggacgcatatgaaacttttggccaagctgcgtctactcaagcactaaaagtcatcatttcgatggaggcttgattaattaagagtaagcgaatttcttatgatttatgatttttattattaaataagttataaaaaaaataagtgtatacaaattttaaagtgactcttaggttttaaaacgaaaattcttattcttgagtaactctttcctgtaggtcaggttgctttctcaggtatagcatgaggtcgctcttattgaccacacctctaccggcatgccgagcaaatgcctgcaaatcgctccccatttcacccaattgtagatatgctaactccagcaatgagttgatgaatctcggtgtgtattttatgtcctcagaggacaacacctgtggtg

SEQ ID NO: 343 - DNA, 80 bp, Artificial Sequence
  LA855 primer
gcacaatatttcaagctataccaagcatacaatcaactatctcatatacaacctggtaaaacctctagtggagtagtaga

SEQ ID NO: 344 - DNA, 83 bp, Artificial Sequence
  LA856 primer
gcttatttagaagtgtcaacaacgtatctaccaacgatttgacccttttccacaccttggctaactcgttgtatcatcactgg

SEQ ID NO: 345 - DNA, 25 bp, Artificial Sequence
  LA414 primer
ccagagctgatgaggggtatctcga

SEQ ID NO: 346 - DNA, 25 bp, Artificial Sequence
  LA749 primer
caagtcttttgtgccttcccgtcgg

SEQ ID NO: 347 - DNA, 25 bp, Artificial Sequence
  LA413 primer
ggacataaaatacacaccgagattc

SEQ ID NO: 348 - DNA, 90 bp, Artificial Sequence
  LA860 primer
tctcaattattattttctactcataacctcacgcaaaataacacagtcaaatcaatcaaaatgaaagcattagtgtataggggcccaggc

SEQ ID NO: 349 - DNA, 26 bp, Artificial Sequence
  N1093 primer
tttcaagatgcaaatcaactttgcta

SEQ ID NO: 350 - DNA, 20 bp, Artificial Sequence
  LA681 primer
ttattgcttagcgttggtag

SEQ ID NO: 351 - DNA, 12319 bp, Artificial Sequence
  pLH689 [pHR81-Ilv5p-K9JB4P.KARI-TEF(M7)p-IlvD.Strep] plasmid
tcccattaccgacatttgggcgctatacgtgcatatgttcatgtatgtatctgtatttaaaacacttttgtattatttttcctcatatatgtgtataggtttatacggatgatttaattattacttcaccaccctttatttcaggctgatatcttagccttgttactagattaatcatgtaattagttatgtcacgcttacattcacgccctccccccacatccgctctaaccgaaaaggaaggagttagacaacctgaagtctaggtccctatttatttttttatagttatgttagtattaagaacgttatttatatttcaaatttttcttttttttctgtacagacgcgtgtacgcatgtaacattatactgaaaaccttgcttgagaaggttttgggacgctcgaaggctttaatttgcgggcggccgcacctggtaaaacctctagtggagtagtagatgtaatcaatgaagcggaagccaaaagaccagagtagaggcctatagaagaaactgcgataccttttgtgatggctaaacaaacagacatctttttatatgtttttacttctgtatatcgtgaagtagtaagtgataagcgaatttggctaagaacgttgtaagtgaacaagggacctcttttgcctttcaaaaaaggattaaatggagttaatcattgagatttagttttcgttagattctgtatccctaaataactcccttacccgacgggaaggcacaaaagacttgaataatagcaaacggccagtagccaagaccaaataatactagagttaactgatggtcttaaacaggcattacgtggtgaactccaagaccaatatacaaaatatcgataagttattcttgcccaccaatttaaggagcctacatcaggacagtagtaccattcctcagagaagaggtatacataacaagaaaatcgcgtgaacaccttatataacttagcccgttattgagctaaaaaaccttgcaaaatttcctatgaataagaatacttcagacgtgataaaaatttactttctaactcttctcacgctgcccctatctgttcttccgctctaccgtgagaaataaagcatcgagtacggcagttcgctgtcactgaactaaaacaataaggctagttcgaatgatgaacttgcttgctgtcaaacttctgagttgccgctgatgtgacactgtgacaataaattcaaaccggttatagcggtctcctccggtaccggttctgccacctccaatagagctcagtaggagtcagaacctctgcggtggctgtcagtgactcatccgcgtttcgtaagttgtgcgcgtgcacatttcgcccgttcccgctcatcttgcagcaggcggaaattttcatcacgctgtaggacgcaaaaaaaaaataattaatcgtacaagaatcttggaaaaaaaattgaaaaattttgtataaaagggatgacctaacttgactcaatggcttttacacccagtattttccctttccttgtttgttacaattatagaagcaagacaaaaacatatagacaacctattcctaggagttatatttttttaccctaccagcaatataagtaaaaaactgtttaaacagtatggaagaatgtaagatggctaagatttactaccaagaagactgtaacttgtccttgttggatggtaagactatcgccgttatcggttacggttctcaaggtcacgctcatgccctgaatgctaaggaatccggttgtaacgttatcattggtttatacgaaggtgcggaggagtggaaaagagctgaagaacaaggtttcgaagtctacaccgctgctgaagctgctaagaaggctgacatcattatgatcttgatcccagatgaaaagcaggctaccatgtacaaaaacgacatcgaaccaaacttggaagccggtaacatgttgatgttcgctcacggtttcaacatccatttcggttgtattgttccaccaaaggacgttgatgtcactatgatcgctccaaagggtccaggtcacaccgttagatccgaatacgaagaaggtaaaggtgtcccatgcttggttgctgtcgaacaagacgctactggcaaggctttggatatggctttggcctacgctttagccatcggtggtgctagagccggtgtcttggaaactaccttcagaaccgaaactgaaaccgacttgttcggtgaacaagctgttttatgtggtggtgtctgcgctttgatgcaggccggttttgaaaccttggttgaagccggttacgacccaagaaacgcttacttcgaatgtatccacgaaatgaagttgatcgttgacttgatctaccaatctggtttctccggtatgcgttactctatctccaacactgctgaatacggtgactacattaccggtccaaagatcattactgaagataccaagaaggctatgaagaagattttgtctgacattcaagatggtacctttgccaaggacttcttggttgacatgtctgatgctggttcccaggtccacttcaaggctatgagaaagttggcctccgaacacccagctgaagttgtcggtgaagaaattagatccttgtactcctggtccgacgaagacaagttgattaacaactgaggccctgcaggccagaggaaaataatatcaagtgctggaaactttttctcttggaatttttgcaacatcaagtcatagtcaattgaattgacccaatttcacatttaagattttttttttttcatccgacatacatctgtacactaggaagccctgtttttctgaagcagcttcaaatatatatattttttacatatttattatgattcaatgaacaatctaattaaatcgaaaacaagaaccgaaacgcgaataaataatttatttagatggtgacaagtgtataagtcctcatcgggacagctacgatttctctttcggttttggctgagctactggttgctgtgacgcagcggcattagcgcggcgttatgagctaccctcgtggcctgaaagatggcgggaataaagcggaactaaaaattactgactgagccatattgaggtcaatttgtcaactcgtcaagtcacgtttggtggacggcccctttccaacgaatcgtatatactaacatgcgcgcgcttcctatatacacatatacatatatatatatatatatatgtgtgcgtgtatgtgtacacctgtatttaatttccttactcgcgggtttttcttttttctcaattcttggcttcctctttctcgagcggaccggatcctcgcgaactccaaaatgagctatcaaaaacgatagatcgattaggatgactttgaaatgactccgcagtggactggccgttaatttcaagcgtgagtaaaatagtgcatgacaaaagatgagctaggcttttgtaaaaatatcttacgttgtaaaattttagaaatcattatttccttcatatcattttgtcattgaccttcagaagaaaagagccgaccaataatataaataaataaataaaaataatattccattatttctaaacagattcaatactcattaaaaaactatatcaattaatttgaattaacgcggccgcttaaccacagcaaccaggacaacattttttgccagtttcttcaggcttccaaaagtctgttacggctcccctagaagcagacgaaacgatgtgagcatatttaccaaggataccgcgtgaatagagcggtggcaattcaatggtctcttgacgatgttttaactcttcatcggagatatcaaagtgtaattccttagtgtcttggtcaatagtgactatgtctcctgtttgcaggtaggcgattggaccgccatcttgtgcttcaggagcgatatgacccacgacaagaccataagtaccacctgagaagcggccatctgtcagaagggcaactttttcaccttgccctttaccaacaatcattgatgaaagggaaagcatttcaggcataccaggaccgccctttggtcctacaaaacgtacgacaacaacatcaccatcaacaatatcatcattcaagacagcttcaatggcttcttcttcagaattaaagaccttagcaggaccgacatgacgacgcacttttacaccagaaactttggcaacggcaccgtctggagccaagttaccatggagaataatgagcggaccatcttcacgtttaggattttcaagcggcataataaccttttgaccaggtgttaaatcatcaaaagccttcaaattttcagcgactgttttgccagtacaagtgatacggtcaccatgaaggaagccatttttaaggagatatttcataactgctggtacccctccgaccttgtaaaggtcttggaatacatattgaccagaaggtttcaaatcagccaaatgaggaactttttcttggaaagtattgaaatcatcaagtgtcaattccacattagcagcatgggcaatagctaagaggtgaagggttgagttggttgaacctcccagagccatagttacagtaatagcatcttcaaaagcttcacgcgttaaaatgtcagaaggttttaagcccatttcgagcattttgacaacagcgcgaccagcttcttcaatatctgctttcttttctgcggattcagccgggtgagaagatgaacccggaaggctaagtcccaaaacttcaatagctgtcgccattgtgttagcagtatacataccaccgcagcctccaggaccgggacaagcattacattccaaagctttaacttcttctttggtcatatcgccgtggttccaatggccgacaccttcaaagacagagactaaatcgatatctttgccgtctaaattaccaggtgcaattgttccgccgtaagcaaaaatggctgggatatccatgttagccatagcgataacagaaccgggcatgtttttatcacaaccgccaatggctacaaaagcatccgcattatgacctcccatggctgcttcaatagaatctgcaataatatcacgagatgtcaaggagaaacgcattccttgggttcccatggcgattccatcagaaaccgtgattgttccgaactgaactggccaagcaccagcttccttaacaccgactttggctagtttaccaaagtcatgtaagtggatattacaaggtgtgttttcagcccaagttgaaatgacaccgacgataggtttttcaaagtcttcatcttgcataccagttgcacgcaacatagcacgattaggtgatttaaccattgaatcgtaaacagaactacgatttcttaagtctttaagagtttttttgtcagtcatactcacgtgaaacttagattagattgctatgctttctttccaatgagcaagaagtaaaaaaagttgtaatagaacaggaaaaatgaagctgaaacttgagaaattgaagaccgtttgttaactcaaatatcaatgggaggtcgtcgaaagagaacaaaatcgaaaaaaaagttttcaagagaaagaaacgtgataaaaatttttattgccttctccgacgaagaaaaagggacgaggcggtctctttttccttttccaaacctttagtacgggtaattaacggcaccctagaggaaggaggagggggaatttagtatgctgtgcttgggtgttttgaagtggtacggcggtgcgcggagtccgagaaaatctggaagagtaaaaaaggagtagagacattttgaagctatgccggcagatctatttaaatggcgcgccgacgtcaggtggcacttttcggggaaatgtgcgcggaacccctatttgtttatttttctaaatacattcaaatatgtatccgctcatgagacaataaccctgataaatgcttcaataatattgaaaaaggaagagtatgagtattcaacatttccgtgtcgcccttattcccttttttgcggcattttgccttcctgtttttgctcacccagaaacgctggtgaaagtaaaagatgctgaagatcagttgggtgcacgagtgggttacatcgaactggatctcaacagcggtaagatccttgagagttttcgccccgaagaacgttttccaatgatgagcacttttaaagttctgctatgtggcgcggtattatcccgtattgacgccgggcaagagcaactcggtcgccgcatacactattctcagaatgacttggttgagtactcaccagtcacagaaaagcatcttacggatggcatgacagtaagagaattatgcagtgctgccataaccatgagtgataacactgcggccaacttacttctgacaacgatcggaggaccgaaggagctaaccgcttttttgcacaacatgggggatcatgtaactcgccttgatcgttgggaaccggagctgaatgaagccataccaaacgacgagcgtgacaccacgatgcctgtagcaatggcaacaacgttgcgcaaactattaactggcgaactacttactctagcttcccggcaacaattaatagactggatggaggcggataaagttgcaggaccacttctgcgctcggcccttccggctggctggtttattgctgataaatctggagccggtgagcgtgggtctcgcggtatcattgcagcactggggccagatggtaagccctcccgtatcgtagttatctacacgacggggagtcaggcaactatggatgaacgaaatagacagatcgctgagataggtgcctcactgattaagcattggtaactgtcagaccaagtttactcatatatactttagattgatttaaaacttcatttttaatttaaaaggatctaggtgaagatcctttttgataatctcatgaccaaaatcccttaacgtgagttttcgttccactgagcgtcagaccccgtagaaaagatcaaaggatcttcttgagatcctttttttctgcgcgtaatctgctgcttgcaaacaaaaaaaccaccgctaccagcggtggtttgtttgccggatcaagagctaccaactctttttccgaaggtaactggcttcagcagagcgcagataccaaatactgttcttctagtgtagccgtagttaggccaccacttcaagaactctgtagcaccgcctacatacctcgctctgctaatcctgttaccagtggctgctgccagtggcgataagtcgtgtcttaccgggttggactcaagacgatagttaccggataaggcgcagcggtcgggctgaacggggggttcgtgcacacagcccagcttggagcgaacgacctacaccgaactgagatacctacagcgtgagctatgagaaagcgccacgcttcccgaagggagaaaggcggacaggtatccggtaagcggcagggtcggaacaggagagcgcacgagggagcttccagggggaaacgcctggtatctttatagtcctgtcgggtttcgccacctctgacttgagcgtcgatttttgtgatgctcgtcaggggggcggagcctatggaaaaacgccagcaacgcggcctttttacggttcctggccttttgctggccttttgctcacatgttctttcctgcgttatcccctgattctgtggataaccgtattaccgcctttgagtgagctgataccgctcgccgcagccgaacgaccgagcgcagcgagtcagtgagcgaggaagcggaagagcgcccaatacgcaaaccgcctctccccgcgcgttggccgattcattaatgcagctggcacgacaggtttcccgactggaaagcgggcagtgagcgcaacgcaattaatgtgagttagctcactcattaggcaccccaggctttacactttatgcttccggctcgtatgttgtgtggaattgtgagcggataacaatttcacacaggaaacagctatgaccatgattacgccaagctttttctttccaattttttttttttcgtcattataaaaatcattacgaccgagattcccgggtaataactgatataattaaattgaagctctaatttgtgagtttagtatacatgcatttacttataatacagttttttagttttgctggccgcatcttctcaaatatgcttcccagcctgcttttctgtaacgttcaccctctaccttagcatcccttccctttgcaaatagtcctcttccaacaataataatgtcagatcctgtagagaccacatcatccacggttctatactgttgacccaatgcgtctcccttgtcatctaaacccacaccgggtgtcataatcaaccaatcgtaaccttcatctcttccacccatgtctctttgagcaataaagccgataacaaaatctttgtcgctcttcgcaatgtcaacagtacccttagtatattctccagtagatagggagcccttgcatgacaattctgctaacatcaaaaggcctctaggttcctttgttacttcttctgccgcctgcttcaaaccgctaacaatacctgggcccaccacaccgtgtgcattcgtaatgtctgcccattctgctattctgtatacacccgcagagtactgcaatttgactgtattaccaatgtcagcaaattttctgtcttcgaagagtaaaaaattgtacttggcggataatgcctttagcggcttaactgtgccctccatggaaaaatcagtcaagatatccacatgtgtttttagtaaacaaattttgggacctaatgcttcaactaactccagtaattccttggtggtacgaacatccaatgaagcacacaagtttgtttgcttttcgtgcatgatattaaatagcttggcagcaacaggactaggatgagtagcagcacgttccttatatgtagctttcgacatgatttatcttcgtttcctgcaggtttttgttctgtgcagttgggttaagaatactgggcaatttcatgtttcttcaacactacatatgcgtatatataccaatctaagtctgtgctccttccttcgttcttccttctgttcggagattaccgaatcaaaaaaatttcaaggaaaccgaaatcaaaaaaaagaataaaaaaaaaatgatgaattgaaaagcttgcatgcctgcaggtcgactctagtatactccgtctactgtacgatacacttccgctcaggtccttgtcctttaacgaggccttaccactcttttgttactctattgatccagctcagcaaaggcagtgtgatctaagattctatcttcgcgatgtagtaaaactagctagaccgagaaagagactagaaatgcaaaaggcacttctacaatggctgccatcattattatccgatgtgacgctgcattttttttttttttttttttttttttttttttttttttttttttttttttttgtacaaatatcataaaaaaagagaatctttttaagcaaggattttcttaacttcttcggcgacagcatcaccgacttcggtggtactgttggaaccacctaaatcaccagttctgatacctgcatccaaaacctttttaactgcatcttcaatggctttaccttcttcaggcaagttcaatgacaatttcaacatcattgcagcagacaagatagtggcgatagggttgaccttattctttggcaaatctggagcggaaccatggcatggttcgtacaaaccaaatgcggtgttcttgtctggcaaagaggccaaggacgcagatggcaacaaacccaaggagcctgggataacggaggcttcatcggagatgatatcaccaaacatgttgctggtgattataataccatttaggtgggttgggttcttaactaggatcatggcggcagaatcaatcaattgatgttgaactttcaatgtagggaattcgttcttgatggtttcctccacagtttttctccataatcttgaagaggccaaaacattagctttatccaaggaccaaataggcaatggtggctcatgttgtagggccatgaaagcggccattcttgtgattctttgcacttctggaacggtgtattgttcactatcccaagcgacaccatcaccatcgtcttcctttctcttaccaaagtaaatacctcccactaattctctaacaacaacgaagtcagtacctttagcaaattgtggcttgattggagataagtctaaaagagagtcggatgcaaagttacatggtcttaagttggcgtacaattgaagttctttacggatttttagtaaaccttgttcaggtctaacactaccggtaccccatttaggaccacccacagcacctaacaaaacggcatcagccttcttggaggcttccagcgcctcatctggaagtggaacacctgtagcatcgatagcagcaccaccaattaaatgattttcgaaatcgaacttgacattggaacgaacatcagaaatagctttaagaaccttaatggcttcggctgtgatttcttgaccaacgtggtcacctggcaaaacgacgatcttcttaggggcagacattacaatggtatatccttgaaatatatataaaaaaaaaaaaaaaaaaaaaaaaaaaaaatgcagcttctcaatgatattcgaatacgctttgaggagatacagcctaatatccgacaaactgttttacagatttacgatcgtacttgttacccatcattgaattttgaacatccgaacctgggagttttccctgaaacagatagtatatttgaacctgtataataatatatagtctagcgctttacggaagacaatgtatgtatttcggttcctggagaaactattgcatctattgcataggtaatcttgcacgtcgcatccccggttcattttctgcgtttccatcttgcacttcaatagcatatctttgttaacgaagcatctgtgcttcattttgtagaacaaaaatgcaacgcgagagcgctaatttttcaaacaaagaatctgagctgcatttttacagaacagaaatgcaacgcgaaagcgctattttaccaacgaagaatctgtgcttcatttttgtaaaacaaaaatgcaacgcgagagcgctaatttttcaaacaaagaatctgagctgcatttttacagaacagaaatgcaacgcgagagcgctattttaccaacaaagaatctatacttcttttttgttctacaaaaatgcatcccgagagcgctatttttctaacaaagcatcttagattactttttttctcctttgtgcgctctataatgcagtctcttgataactttttgcactgtaggtccgttaaggttagaagaaggctactttggtgtctattttctcttccataaaaaaagcctgactccacttcccgcgtttactgattactagcgaagctgcgggtgcattttttcaagataaaggcatccccgattatattctataccgatgtggattgcgcatactttgtgaacagaaagtgatagcgttgatgattcttcattggtcagaaaattatgaacggtttcttctattttgtctctatatactacgtataggaaatgtttacattttcgtattgttttcgattcactctatgaatagttcttactacaatttttttgtctaaagagtaatactagagataaacataaaaaatgtagaggtcgagtttagatgcaagttcaaggagcgaaaggtggatgggtaggttatatagggatatagcacagagatatatagcaaagagatacttttgagcaatgtttgtggaagcggtattcgcaatattttagtagctcgttacagtccggtgcgtttttggttttttgaaagtgcgtcttcagagcgcttttggttttcaaaagcgctctgaagttcctatactttctagagaataggaacttcggaataggaacttcaaagcgtttccgaaaacgagcgcttccgaaaatgcaacgcgagctgcgcacatacagctcactgttcacgtcgcacctatatctgcgtgttgcctgtatatatatatacatgagaagaacggcatagtgcgtgtttatgcttaaatgcgtacttatatgcgtctatttatgtaggatgaaaggtagtctagtacctcctgtgatattatcccattccatgcggggtatcgtatgcttccttcagcactaccctttagctgttctatatgctgccactcctcaattggattagtctcatccttcaatgctatcatttcctttgatattggatcatatgcatagtaccgagaaactagaggatc

SEQ ID NO: 352 - protein, 343 aa, Anaerostipes caccae
MEECKMAKIYYQEDCNLSLLDGKTIAVIGYGSQGHAHALNAKESGCNVIIGLYEGAEEWKRAEEQGFEVYTAAEAAKKADIIMILIPDEKQATMYKNDIEPNLEAGNMLMFAHGFNIHFGCIVPPKDVDVTMIAPKGPGHTVRSEYEEGKGVPCLVAVEQDATGKALDMALAYALAIGGARAGVLETTFRTETETDLFGEQAVLCGGVCALMQAGFETLVEAGYDPRNAYFECIHEMKLIVDLIYQSGFSGMRYSISNTAEYGDYITGPKIITEDTKKAMKKILSDIQDGTFAKDFLVDMSDAGSQVHFKAMRKLASEHPAEVVGEEIRSLYSWSDEDKLINN

SEQ ID NO: 353 - DNA, 1032 bp, Anaerostipes caccae
atggaagaatgtaagatggctaagatttactaccaagaagactgtaacttgtccttgttggatggtaagactatcgccgttatcggttacggttctcaaggtcacgctcatgccctgaatgctaaggaatccggttgtaacgttatcattggtttatacgaaggtgcggaggagtggaaaagagctgaagaacaaggtttcgaagtctacaccgctgctgaagctgctaagaaggctgacatcattatgatcttgatcccagatgaaaagcaggctaccatgtacaaaaacgacatcgaaccaaacttggaagccggtaacatgttgatgttcgctcacggtttcaacatccatttcggttgtattgttccaccaaaggacgttgatgtcactatgatcgctccaaagggtccaggtcacaccgttagatccgaatacgaagaaggtaaaggtgtcccatgcttggttgctgtcgaacaagacgctactggcaaggctttggatatggctttggcctacgctttagccatcggtggtgctagagccggtgtcttggaaactaccttcagaaccgaaactgaaaccgacttgttcggtgaacaagctgttttatgtggtggtgtctgcgctttgatgcaggccggttttgaaaccttggttgaagccggttacgacccaagaaacgcttacttcgaatgtatccacgaaatgaagttgatcgttgacttgatctaccaatctggtttctccggtatgcgttactctatctccaacactgctgaatacggtgactacattaccggtccaaagatcattactgaagataccaagaaggctatgaagaagattttgtctgacattcaagatggtacctttgccaaggacttcttggttgacatgtctgatgctggttcccaggtccacttcaaggctatgagaaagttggcctccgaacacccagctgaagttgtcggtgaagaaattagatccttgtactcctggtccgacgaagacaagttgattaacaactga

SEQ ID NO: 354 - DNA, 6005 bp, Artificial Sequence
  pBP2642 plasmid
tcgcgcgtttcggtgatgacggtgaaaacctctgacacatgcagctcccggagacggtcacagcttgtctgtaagcggatgccgggagcagacaagcccgtcagggcgcgtcagcgcgtgttggcgggtgtcggggctggcttaactatgcggcatcagagcagattgtactgagagtgcaccataaattcccgttttaagagcttggtgagcgctaggagtcactgccaggtatcgtttgaacacggcattagtcagggaagtcataacacagtcctttcccgcaattttctttttctattactcttggcctcctctagtacactctatatttttttatgcctcggtaatgattttcatttttttttttcccctagcggatgactctttttttttcttagcgattggcattatcacataatgaattatacattatataaagtaatgtgatttcttcgaagaatatactaaaaaatgagcaggcaagataaacgaaggcaaagatgacagagcagaaagccctagtaaagcgtattacaaatgaaaccaagattcagattgcgatctctttaaagggtggtcccctagcgatagagcactcgatcttcccagaaaaagaggcagaagcagtagcagaacaggccacacaatcgcaagtgattaacgtccacacaggtatagggtttctggaccatatgatacatgctctggccaagcattccggctggtcgctaatcgttgagtgcattggtgacttacacatagacgaccatcacaccactgaagactgcgggattgctctcggtcaagcttttaaagaggccctactggcgcgtggagtaaaaaggtttggatcaggatttgcgcctttggatgaggcactttccagagcggtggtagatctttcgaacaggccgtacgcagttgtcgaacttggtttgcaaagggagaaagtaggagatctctcttgcgagatgatcccgcattttcttgaaagctttgcagaggctagcagaattaccctccacgttgattgtctgcgaggcaagaatgatcatcaccgtagtgagagtgcgttcaaggctcttgcggttgccataagagaagccacctcgcccaatggtaccaacgatgttccctccaccaaaggtgttcttatgtagtgacaccgattatttaaagctgcagcatacgatatatatacatgtgtatatatgtatacctatgaatgtcagtaagtatgtatacgaacagtatgatactgaagatgacaaggtaatgcatcattctatacgtgtcattctgaacgaggcgcgctttccttttttctttttgctttttctttttttttctcttgaactcgacggatctatgcggtgtgaaataccgcacagatgcgtaaggagaaaataccgcatcaggaaattgtaaacgttaatattttgttaaaattcgcgttaaatttttgttaaatcagctcattttttaaccaataggccgaaatcggcaaaatcccttataaatcaaaagaatagaccgagatagggttgagtgttgttccagtttggaacaagagtccactattaaagaacgtggactccaacgtcaaagggcgaaaaaccgtctatcagggcgatggcccactacgtgaaccatcaccctaatcaagttttttggggtcgaggtgccgtaaagcactaaatcggaaccctaaagggagcccccgatttagagcttgacggggaaagccggcgaacgtggcgagaaaggaagggaagaaagcgaaaggagcgggcgctagggcgctggcaagtgtagcggtcacgctgcgcgtaaccaccacacccgccgcgcttaatgcgccgctacagggcgcgtcgcgccattcgccattcaggctgcgcaactgttgggaagggcgatcggtgcgggcctcttcgctattacgccagctggcgaaagggggatgtgctgcaaggcgattaagttgggtaacgccagggttttcccagtcacgacgttgtaaaacgacggccagtgagcgcgcgtaatacgactcactatagggcgaattgggtaccgggccccccctcgaggtcgacgcggccgcggcgcgccgcttgcatttagtcgtgcaatgtatgactttaagatttgtgagcaggaagaaaagggagaatcttctaacgataaacccttgaaaaactgggtagactacgctatgttgagttgctacgcaggctgcacaattacacgagaatgctcccgcctaggatttaaggctaagggacgtgcaatgcagacgacagatctaaatgaccgtgtcggtgaagtgttcgccaaacttttcggttaacacatgcagtgatgcacgcgcgatggtgctaagttacatatatatatatatatatatagccatagtgatgtctaagtaacctttatggtatatttcttaatgtggaaagatactagcgcgcgcacccacacacaagcttcgtcttttcttgaagaaaagaggaagctcgctaaatgggattccactttccgttccctgccagctgatggaaaaaggttagtggaacgatgaagaataaaaagagagatccactgaggtgaaatttcagctgacagcgagtttcatgatcgtgatgaacaatggtaacgagttgtggctgttgccagggagggtggttctcaacttttaatgtatggccaaatcgctacttgggtttgttatataacaaagaagaaataatgaactgattctcttcctccttcttgtcctttcttaattctgttgtaattaccttcctttgtaattttttttgtaattattcttcttaataatccaaacaaacacacatattacaatagtttaaacttaattaagagtaagcgaatttcttatgatttatgatttttattattaaataagttataaaaaaaataagtgtatacaaattttaaagtgactcttaggttttaaaacgaaaattcttattcttgagtaactctttcctgtaggtcaggttgctttctcaggtatagcatgaggtcgctcttattgaccacacctctaccggcatgccgagcaaatgcctgcaaatcgctccccatttcacccaattgtagatatgctaactccagcaatgagttgatgaatctcggtgtgtattttatgtcctcagaggacaacacctgtggtcgcggtggagctccagcttttgttccctttagtgagggttaattgcgcgcttggcgtaatcatggtcatagctgtttcctgtgtgaaattgttatccgctcacaattccacacaacataggagccggaagcataaagtgtaaagcctggggtgcctaatgagtgaggtaactcacattaattgcgttgcgctcactgcccgctttccagtcgggaaacctgtcgtgccagctgcattaatgaatcggccaacgcgcggggagaggcggtttgcgtattgggcgctcttccgcttcctcgctcactgactcgctgcgctcggtcgttcggctgcggcgagcggtatcagctcactcaaaggcggtaatacggttatccacagaatcaggggataacgcaggaaagaacatgtgagcaaaaggccagcaaaaggccaggaaccgtaaaaaggccgcgttgctggcgtttttccataggctccgcccccctgacgagcatcacaaaaatcgacgctcaagtcagaggtggcgaaacccgacaggactataaagataccaggcgtttccccctggaagctccctcgtgcgctctcctgttccgaccctgccgcttaccggatacctgtccgcctttctcccttcgggaagcgtggcgctttctcatagctcacgctgtaggtatctcagttcggtgtaggtcgttcgctccaagctgggctgtgtgcacgaaccccccgttcagcccgaccgctgcgccttatccggtaactatcgtcttgagtccaacccggtaagacacgacttatcgccactggcagcagccactggtaacaggattagcagagcgaggtatgtaggcggtgctacagagttcttgaagtggtggcctaactacggctacactagaaggacagtatttggtatctgcgctctgctgaagccagttaccttcggaaaaagagttggtagctcttgatccggcaaacaaaccaccgctggtagcggtggtttttttgtttgcaagcagcagattacgcgcagaaaaaaaggatctcaagaagatcctttgatcttttctacggggtctgacgctcagtggaacgaaaactcacgttaagggattttggtcatgagattatcaaaaaggatcttcacctagatccttttaaattaaaaatgaagttttaaatcaatctaaagtatatatgagtaaacttggtctgacagttaccaatgcttaatcagtgaggcacctatctcagcgatctgtctatttcgttcatccatagttgcctgactccccgtcgtgtagataactacgatacgggagggcttaccatctggccccagtgctgcaatgataccgcgagacccacgctcaccggctccagatttatcagcaataaaccagccagccggaagggccgagcgcagaagtggtcctgcaactttatccgcctccatccagtctattaattgttgccgggaagctagagtaagtagttcgccagttaatagtttgcgcaacgttgttgccattgctacaggcatcgtggtgtcacgctcgtcgtttggtatggcttcattcagctccggttcccaacgatcaaggcgagttacatgatcccccatgttgtgcaaaaaagcggttagctccttcggtcctccgatcgttgtcagaagtaagttggccgcagtgttatcactcatggttatggcagcactgcataattctcttactgtcatgccatccgtaagatgcttttctgtgactggtgagtactcaaccaagtcattctgagaatagtgtatgcggcgaccgagttgctcttgcccggcgtcaatacgggataataccgcgccacatagcagaactttaaaagtgctcatcattggaaaacgttcttcggggcgaaaactctcaaggatcttaccgctgttgagatccagttcgatgtaacccactcgtgcacccaactgatcttcagcatcttttactttcaccagcgtttctgggtgagcaaaaacaggaaggcaaaatgccgcaaaaaagggaataagggcgacacggaaatgttgaatactcatactcttcctttttcaatattattgaagcatttatcagggttattgtctcatgagcggatacatatttgaatgtatttagaaaaataaacaaataggggttccgcgcacatttccccgaaaagtgccacctgggtccttttcatcacgtgctataaaaataattataatttaaattttttaatataaatatataaattaaaaatagaaagtaaaaaaagaaattaaagaaaaaatagtttttgttttccgaagatgtaaaagactctagggggatcgccaacaaatactaccttttatcttgctcttcctgctctcaggtattaatgccgaattgtttcatcttgtctgtgtagaagaccacacacgaaaatcctgtgattttacattttacttatcgttaatcgaatgtatatctatttaatctgcttttcttgtctaataaatatatatgtaaagtacgctttttgttgaaattttttaaacctttgtttatttttttttcttcattccgtaactcttctaccttctttatttactttctaaaatccaaatacaaaacataaaaataaataaacacagagtaaattcccaaattattccatcattaaaagatacgaggcgcgtgtaagttacaggcaagcgatccgtcctaagaaaccattattatcatgacattaacctataaaaataggcgtatcacgaggccctttcgtc

SEQ ID NO: 355 - DNA, 315 bp, Saccharomyces cerevisiae
atggtcactcaattaaaatccgcttctgaatacgacagtgctttagcatctagcgacaagttagtcgttgttgacttttttgccacatggtgtgggccatgtaaaatgattgcaccaatgattgaaaagtttgcagaacaatattctgatgctgctttttacaagttggatgttgatgaagtctcagatgttgctcaaaaagctgaagtttcttccatgcctaccctgatcttctacaagggcggtaaggaggttaccagagtcgtcggtgccaacccagctgctatcaagcaagctattgcttccaacgtatag

SEQ ID NO: 356 - DNA, 45 bp, Artificial Sequence
  OT1666 primer
agatcactagtttaaacatggtcactcaattaaaatccgcttctg

SEQ ID NO: 357 - DNA, 55 bp, Artificial Sequence
  OT1667 primer
ctcgagggcctgcagggccttaattaactatacgttggaagcaatagcttgcttg

SEQ ID NO: 358 - DNA, 6320 bp, Artificial Sequence
  pRS413-GPM1-TRX2 plasmid
tcgcgcgtttcggtgatgacggtgaaaacctctgacacatgcagctcccggagacggtcacagcttgtctgtaagcggatgccgggagcagacaagcccgtcagggcgcgtcagcgcgtgttggcgggtgtcggggctggcttaactatgcggcatcagagcagattgtactgagagtgcaccataaattcccgttttaagagcttggtgagcgctaggagtcactgccaggtatcgtttgaacacggcattagtcagggaagtcataacacagtcctttcccgcaattttctttttctattactcttggcctcctctagtacactctatatttttttatgcctcggtaatgattttcatttttttttttcccctagcggatgactctttttttttcttagcgattggcattatcacataatgaattatacattatataaagtaatgtgatttcttcgaagaatatactaaaaaatgagcaggcaagataaacgaaggcaaagatgacagagcagaaagccctagtaaagcgtattacaaatgaaaccaagattcagattgcgatctctttaaagggtggtcccctagcgatagagcactcgatcttcccagaaaaagaggcagaagcagtagcagaacaggccacacaatcgcaagtgattaacgtccacacaggtatagggtttctggaccatatgatacatgctctggccaagcattccggctggtcgctaatcgttgagtgcattggtgacttacacatagacgaccatcacaccactgaagactgcgggattgctctcggtcaagcttttaaagaggccctactggcgcgtggagtaaaaaggtttggatcaggatttgcgcctttggatgaggcactttccagagcggtggtagatctttcgaacaggccgtacgcagttgtcgaacttggtttgcaaagggagaaagtaggagatctctcttgcgagatgatcccgcattttcttgaaagctttgcagaggctagcagaattaccctccacgttgattgtctgcgaggcaagaatgatcatcaccgtagtgagagtgcgttcaaggctcttgcggttgccataagagaagccacctcgcccaatggtaccaacgatgttccctccaccaaaggtgttcttatgtagtgacaccgattatttaaagctgcagcatacgatatatatacatgtgtatatatgtatacctatgaatgtcagtaagtatgtatacgaacagtatgatactgaagatgacaaggtaatgcatcattctatacgtgtcattctgaacgaggcgcgctttccttttttctttttgctttttctttttttttctcttgaactcgacggatctatgcggtgtgaaataccgcacagatgcgtaaggagaaaataccgcatcaggaaattgtaaacgttaatattttgttaaaattcgcgttaaatttttgttaaatcagctcattttttaaccaataggccgaaatcggcaaaatcccttataaatcaaaagaatagaccgagatagggttgagtgttgttccagtttggaacaagagtccactattaaagaacgtggactccaacgtcaaagggcgaaaaaccgtctatcagggcgatggcccactacgtgaaccatcaccctaatcaagttttttggggtcgaggtgccgtaaagcactaaatcggaaccctaaagggagcccccgatttagagcttgacggggaaagccggcgaacgtggcgagaaaggaagggaagaaagcgaaaggagcgggcgctagggcgctggcaagtgtagcggtcacgctgcgcgtaaccaccacacccgccgcgcttaatgcgccgctacagggcgcgtcgcgccattcgccattcaggctgcgcaactgttgggaagggcgatcggtgcgggcctcttcgctattacgccagctggcgaaagggggatgtgctgcaaggcgattaagttgggtaacgccagggttttcccagtcacgacgttgtaaaacgacggccagtgagcgcgcgtaatacgactcactatagggcgaattgggtaccgggccccccctcgaggtcgacgcggccgcggcgcgccgcttgcatttagtcgtgcaatgtatgactttaagatttgtgagcaggaagaaaagggagaatcttctaacgataaacccttgaaaaactgggtagactacgctatgttgagttgctacgcaggctgcacaattacacgagaatgctcccgcctaggatttaaggctaagggacgtgcaatgcagacgacagatctaaatgaccgtgtcggtgaagtgttcgccaaacttttcggttaacacatgcagtgatgcacgcgcgatggtgctaagttacatatatatatatatatatatagccatagtgatgtctaagtaacctttatggtatatttcttaatgtggaaagatactagcgcgcgcacccacacacaagcttcgtcttttcttgaagaaaagaggaagctcgctaaatgggattccactttccgttccctgccagctgatggaaaaaggttagtggaacgatgaagaataaaaagagagatccactgaggtgaaatttcagctgacagcgagtttcatgatcgtgatgaacaatggtaacgagttgtggctgttgccagggagggtggttctcaacttttaatgtatggccaaatcgctacttgggtttgttatataacaaagaagaaataatgaactgattctcttcctccttcttgtcctttcttaattctgttgtaattaccttcctttgtaattttttttgtaattattcttcttaataatccaaacaaacacacatattacaatagtttaaacatggtcactcaattaaaatccgcttctgaatacgacagtgctttagcatctagcgacaagttagtcgttgttgacttttttgccacatggtgtgggccatgtaaaatgattgcaccaatgattgaaaagtttgcagaacaatattctgatgctgctttttacaagttggatgttgatgaagtctcagatgttgctcaaaaagctgaagtttcttccatgcctaccctgatcttctacaagggcggtaaggaggttaccagagtcgtcggtgccaacccagctgctatcaagcaagctattgcttccaacgtatagttaattaagagtaagcgaatttcttatgatttatgatttttattattaaataagttataaaaaaaataagtgtatacaaattttaaagtgactcttaggttttaaaacgaaaattcttattcttgagtaactctttcctgtaggtcaggttgctttctcaggtatagcatgaggtcgctcttattgaccacacctctaccggcatgccgagcaaatgcctgcaaatcgctccccatttcacccaattgtagatatgctaactccagcaatgagttgatgaatctcggtgtgtattttatgtcctcagaggacaacacctgtggtcgcggtggagctccagcttttgttccctttagtgagggttaattgcgcgcttggcgtaatcatggtcatagctgtttcctgtgtgaaattgttatccgctcacaattccacacaacataggagccggaagcataaagtgtaaagcctggggtgcctaatgagtgaggtaactcacattaattgcgttgcgctcactgcccgctttccagtcgggaaacctgtcgtgccagctgcattaatgaatcggccaacgcgcggggagaggcggtttgcgtattgggcgctcttccgcttcctcgctcactgactcgctgcgctcggtcgttcggctgcggcgagcggtatcagctcactcaaaggcggtaatacggttatccacagaatcaggggataacgcaggaaagaacatgtgagcaaaaggccagcaaaaggccaggaaccgtaaaaaggccgcgttgctggcgtttttccataggctccgcccccctgacgagcatcacaaaaatcgacgctcaagtcagaggtggcgaaacccgacaggactataaagataccaggcgtttccccctggaagctccctcgtgcgctctcctgttccgaccctgccgcttaccggatacctgtccgcctttctcccttcgggaagcgtggcgctttctcatagctcacgctgtaggtatctcagttcggtgtaggtcgttcgctccaagctgggctgtgtgcacgaaccccccgttcagcccgaccgctgcgccttatccggtaactatcgtcttgagtccaacccggtaagacacgacttatcgccactggcagcagccactggtaacaggattagcagagcgaggtatgtaggcggtgctacagagttcttgaagtggtggcctaactacggctacactagaaggacagtatttggtatctgcgctctgctgaagccagttaccttcggaaaaagagttggtagctcttgatccggcaaacaaaccaccgctggtagcggtggtttttttgtttgcaagcagcagattacgcgcagaaaaaaaggatctcaagaagatcctttgatcttttctacggggtctgacgctcagtggaacgaaaactcacgttaagggattttggtcatgagattatcaaaaaggatcttcacctagatccttttaaattaaaaatgaagttttaaatcaatctaaagtatatatgagtaaacttggtctgacagttaccaatgcttaatcagtgaggcacctatctcagcgatctgtctatttcgttcatccatagttgcctgactccccgtcgtgtagataactacgatacgggagggcttaccatctggccccagtgctgcaatgataccgcgagacccacgctcaccggctccagatttatcagcaataaaccagccagccggaagggccgagcgcagaagtggtcctgcaactttatccgcctccatccagtctattaattgttgccgggaagctagagtaagtagttcgccagttaatagtttgcgcaacgttgttgccattgctacaggcatcgtggtgtcacgctcgtcgtttggtatggcttcattcagctccggttcccaacgatcaaggcgagttacatgatcccccatgttgtgcaaaaaagcggttagctccttcggtcctccgatcgttgtcagaagtaagttggccgcagtgttatcactcatggttatggcagcactgcataattctcttactgtcatgccatccgtaagatgcttttctgtgactggtgagtactcaaccaagtcattctgagaatagtgtatgcggcgaccgagttgctcttgcccggcgtcaatacgggataataccgcgccacatagcagaactttaaaagtgctcatcattggaaaacgttcttcggggcgaaaactctcaaggatcttaccgctgttgagatccagttcgatgtaacccactcgtgcacccaactgatcttcagcatcttttactttcaccagcgtttctgggtgagcaaaaacaggaaggcaaaatgccgcaaaaaagggaataagggcgacacggaaatgttgaatactcatactcttcctttttcaatattattgaagcatttatcagggttattgtctcatgagcggatacatatttgaatgtatttagaaaaataaacaaataggggttccgcgcacatttccccgaaaagtgccacctgggtccttttcatcacgtgctataaaaataattataatttaaattttttaatataaatatataaattaaaaatagaaagtaaaaaaagaaattaaagaaaaaatagtttttgttttccgaagatgtaaaagactctagggggatcgccaacaaatactaccttttatcttgctcttcctgctctcaggtattaatgccgaattgtttcatcttgtctgtgtagaagaccacacacgaaaatcctgtgattttacattttacttatcgttaatcgaatgtatatctatttaatctgcttttcttgtctaataaatatatatgtaaagtacgctttttgttgaaattttttaaacctttgtttatttttttttcttcattccgtaactcttctaccttctttatttactttctaaaatccaaatacaaaacataaaaataaataaacacagagtaaattcccaaattattccatcattaaaagatacgaggcgcgtgtaagttacaggcaagcgatccgtcctaagaaaccattattatcatgacattaacctataaaaataggcgtatcacgaggccctttcgtc

SEQ ID NO: 359 - DNA, 49 bp, Artificial Sequence
  OT1656 primer
cagatcactagtttaaacatggaaccaattgatgacttactttttgagg

SEQ ID NO: 360 - DNA, 61 bp, Artificial Sequence
  OT1657 primer
actcgagggcctgcagggccttaattaatcattttataccagtaaaatagtcatttagaga

SEQ ID NO: 361 - DNA, 8030 bp, Artificial Sequence
  pRS413-GPM1-YBP1 plasmid
tcgcgcgtttcggtgatgacggtgaaaacctctgacacatgcagctcccggagacggtcacagcttgtctgtaagcggatgccgggagcagacaagcccgtcagggcgcgtcagcgcgtgttggcgggtgtcggggctggcttaactatgcggcatcagagcagattgtactgagagtgcaccataaattcccgttttaagagcttggtgagcgctaggagtcactgccaggtatcgtttgaacacggcattagtcagggaagtcataacacagtcctttcccgcaattttctttttctattactcttggcctcctctagtacactctatatttttttatgcctcggtaatgattttcatttttttttttcccctagcggatgactctttttttttcttagcgattggcattatcacataatgaattatacattatataaagtaatgtgatttcttcgaagaatatactaaaaaatgagcaggcaagataaacgaaggcaaagatgacagagcagaaagccctagtaaagcgtattacaaatgaaaccaagattcagattgcgatctctttaaagggtggtcccctagcgatagagcactcgatcttcccagaaaaagaggcagaagcagtagcagaacaggccacacaatcgcaagtgattaacgtccacacaggtatagggtttctggaccatatgatacatgctctggccaagcattccggctggtcgctaatcgttgagtgcattggtgacttacacatagacgaccatcacaccactgaagactgcgggattgctctcggtcaagcttttaaagaggccctactggcgcgtggagtaaaaaggtttggatcaggatttgcgcctttggatgaggcactttccagagcggtggtagatctttcgaacaggccgtacgcagttgtcgaacttggtttgcaaagggagaaagtaggagatctctcttgcgagatgatcccgcattttcttgaaagctttgcagaggctagcagaattaccctccacgttgattgtctgcgaggcaagaatgatcatcaccgtagtgagagtgcgttcaaggctcttgcggttgccataagagaagccacctcgcccaatggtaccaacgatgttccctccaccaaaggtgttcttatgtagtgacaccgattatttaaagctgcagcatacgatatatatacatgtgtatatatgtatacctatgaatgtcagtaagtatgtatacgaacagtatgatactgaagatgacaaggtaatgcatcattctatacgtgtcattctgaacgaggcgcgctttccttttttctttttgctttttctttttttttctcttgaactcgacggatctatgcggtgtgaaataccgcacagatgcgtaaggagaaaataccgcatcaggaaattgtaaacgttaatattttgttaaaattcgcgttaaatttttgttaaatcagctcattttttaaccaataggccgaaatcggcaaaatcccttataaatcaaaagaatagaccgagatagggttgagtgttgttccagtttggaacaagagtccactattaaagaacgtggactccaacgtcaaagggcgaaaaaccgtctatcagggcgatggcccactacgtgaaccatcaccctaatcaagttttttggggtcgaggtgccgtaaagcactaaatcggaaccctaaagggagcccccgatttagagcttgacggggaaagccggcgaacgtggcgagaaaggaagggaagaaagcgaaaggagcgggcgctagggcgctggcaagtgtagcggtcacgctgcgcgtaaccaccacacccgccgcgcttaatgcgccgctacagggcgcgtcgcgccattcgccattcaggctgcgcaactgttgggaagggcgatcggtgcgggcctcttcgctattacgccagctggcgaaagggggatgtgctgcaaggcgattaagttgggtaacgccagggttttcccagtcacgacgttgtaaaacgacggccagtgagcgcgcgtaatacgactcactatagggcgaattgggtaccgggccccccctcgaggtcgacgcggccgcggcgcgccgcttgcatttagtcgtgcaatgtatgactttaagatttgtgagcaggaagaaaagggagaatcttctaacgataaacccttgaaaaactgggtagactacgctatgttgagttgctacgcaggctgcacaattacacgagaatgctcccgcctaggatttaaggctaagggacgtgcaatgcagacgacagatctaaatgaccgtgtcggtgaagtgttcgccaaacttttcggttaacacatgcagtgatgcacgcgcgatggtgctaagttacatatatatatatatatatatagccatagtgatgtctaagtaacctttatggtatatttcttaatgtggaaagatactagcgcgcgcacccacacacaagcttcgtcttttcttgaagaaaagaggaagctcgctaaatgggattccactttccgttccctgccagctgatggaaaaaggttagtggaacgatgaagaataaaaagagagatccactgaggtgaaatttcagctgacagcgagtttcatgatcgtgatgaacaatggtaacgagttgtggctgttgccagggagggtggttctcaacttttaatgtatggccaaatcgctacttgggtttgttatataacaaagaagaaataatgaactgattctcttcctccttcttgtcctttcttaattctgttgtaattaccttcctttgtaattttttttgtaattattcttcttaataatccaaacaaacacacatattacaatagtttaaacatggaaccaattgatgacttactttttgaggttactgatgcgttcaaaactcagaaggaggatcttcttgagttggtaacattgattgatatatatggcgagcaagttaaccaagaggggagctatgaagaaaagacgagattcattgaaactttgaatacattgttagaggataatccgagtactactggtgaaatcggttgggatctgcctaagggattattgaagttcttgtcaaaggataatgtcgatgtaaatggaagactaggtacgaatatgattgtccaaggtgtaatgaagtgtttctatgccatctcaatccaaggcgagcccaaaaaatgtttaattactgggttggagttgctttcatccctttgttcaaaagatttttccaagagtgatcaacagaataaggaagactttgttgataaaaaggccaatacgttacctcctgaaggagtgatcgaaaattcctctaatcgaaaagattttccatcctacggtgaaagcaagagttcaaatgaatttttcttgaagttgaaatcctacattttatttgaattcataggggcgagtctgaaaaggatttctactctgtttccttcgaaatatctgggagctgctgtgtcaacaattgagaaatttgtgtatagtcatgcggacacttttgaagatgcccttttccttcttcgtagggtgtacacattctgcaggaactatattccccctgatccaccaaaagatatacaattgaacgaagattttactcgagagatgtttgataaagttgtggaggaagaaagtgaattacaggttagactattgcgtaggctttgtacttttggtatttcgacacccataaaaactgtcaccaccaatgccgacgtgaaatactattgtgcactaaatcaacagaagtttgaattatctgcatattacaccgaatatcttgagctattttgcaggtattaccaaatggcgttctcgcttgatgttgatatagagggagaatttcagaatgtgataaaagaatgtaggattatttataagtctgtaccccaggagatttctgctgttaatgatgaagcgaagttggttttggaaagaatggtatataaattggcttatacattcgaagtacaaaaggccgctaaagaaaaaaatgttggtttggactataatggtgtaatattattttctggtatccactatttggaaaccaatcaacatttagtaaaggaaatgaatataacggatgccatttatctctacttgagatttacaactccatcattatattctaaagtttactataatgtagcagttgaatcagttagtcgctactggctatggtatgccattacaaccgagcccttggaggatgtaaaaaaagaattgaagaatctttcagtgtttgttacaaaaacattattgcatgttctacttcaaaagaactgtattcaggtcaatcagcagttaagaatgataactttcactcttctcaccagattactatgtttaatacctgaaaaagttgcatttgagtttatcttagatgtgcttaagacatctccccttccattggctaagacgtccgtattatgtgtttttaaagacctttcaaggcgacgcatctccaccaaggataacgattctgagacggatttgattgtcgaaaaattatccaaactgaaggtcaatgatagtaacaaagctcagcaaagtaacatcagacattatatccaactagattcttccaaaatgaaagctgttcatgactgttgtctgcagactatccaagattcatttacggcagatgccaagaagagtgatatattattactgctaacttacttgaatattttcattgtgctaaaaaaaacatgggatgaagatctactgaagattgtttgttcgaagattgattctaatttgaagtcagtcgaacctgataaacttccgaagtataaggaaattgtggataaaaacgaatctctaaatgactattttactggtataaaatgattaattaagagtaagcgaatttcttatgatttatgatttttattattaaataagttataaaaaaaataagtgtatacaaattttaaagtgactcttaggttttaaaacgaaaattcttattcttgagtaactctttcctgtaggtcaggttgctttctcaggtatagcatgaggtcgctcttattgaccacacctctaccggcatgccgagcaaatgcctgcaaatcgctccccatttcacccaattgtagatatgctaactccagcaatgagttgatgaatctcggtgtgtattttatgtcctcagaggacaacacctgtggtcgcggtggagctccagcttttgttccctttagtgagggttaattgcgcgcttggcgtaatcatggtcatagctgtttcctgtgtgaaattgttatccgctcacaattccacacaacataggagccggaagcataaagtgtaaagcctggggtgcctaatgagtgaggtaactcacattaattgcgttgcgctcactgcccgctttccagtcgggaaacctgtcgtgccagctgcattaatgaatcggccaacgcgcggggagaggcggtttgcgtattgggcgctcttccgcttcctcgctcactgactcgctgcgctcggtcgttcggctgcggcgagcggtatcagctcactcaaaggcggtaatacggttatccacagaatcaggggataacgcaggaaagaacatgtgagcaaaaggccagcaaaaggccaggaaccgtaaaaaggccgcgttgctggcgtttttccataggctccgcccccctgacgagcatcacaaaaatcgacgctcaagtcagaggtggcgaaacccgacaggactataaagataccaggcgtttccccctggaagctccctcgtgcgctctcctgttccgaccctgccgcttaccggatacctgtccgcctttctcccttcgggaagcgtggcgctttctcatagctcacgctgtaggtatctcagttcggtgtaggtcgttcgctccaagctgggctgtgtgcacgaaccccccgttcagcccgaccgctgcgccttatccggtaactatcgtcttgagtccaacccggtaagacacgacttatcgccactggcagcagccactggtaacaggattagcagagcgaggtatgtaggcggtgctacagagttcttgaagtggtggcctaactacggctacactagaaggacagtatttggtatctgcgctctgctgaagccagttaccttcggaaaaagagttggtagctcttgatccggcaaacaaaccaccgctggtagcggtggtttttttgtttgcaagcagcagattacgcgcagaaaaaaaggatctcaagaagatcctttgatcttttctacggggtctgacgctcagtggaacgaaaactcacgttaagggattttggtcatgagattatcaaaaaggatcttcacctagatccttttaaattaaaaatgaagttttaaatcaatctaaagtatatatgagtaaacttggtctgacagttaccaatgcttaatcagtgaggcacctatctcagcgatctgtctatttcgttcatccatagttgcctgactccccgtcgtgtagataactacgatacgggagggcttaccatctggccccagtgctgcaatgataccgcgagacccacgctcaccggctccagatttatcagcaataaaccagccagccggaagggccgagcgcagaagtggtcctgcaactttatccgcctccatccagtctattaattgttgccgggaagctagagtaagtagttcgccagttaatagtttgcgcaacgttgttgccattgctacaggcatcgtggtgtcacgctcgtcgtttggtatggcttcattcagctccggttcccaacgatcaaggcgagttacatgatcccccatgttgtgcaaaaaagcggttagctccttcggtcctccgatcgttgtcagaagtaagttggccgcagtgttatcactcatggttatggcagcactgcataattctcttactgtcatgccatccgtaagatgcttttctgtgactggtgagtactcaaccaagtcattctgagaatagtgtatgcggcgaccgagttgctcttgcccggcgtcaatacgggataataccgcgccacatagcagaactttaaaagtgctcatcattggaaaacgttcttcggggcgaaaactctcaaggatcttaccgctgttgagatccagttcgatgtaacccactcgtgcacccaactgatcttcagcatcttttactttcaccagcgtttctgggtgagcaaaaacaggaaggcaaaatgccgcaaaaaagggaataagggcgacacggaaatgttgaatactcatactcttcctttttcaatattattgaagcatttatcagggttattgtctcatgagcggatacatatttgaatgtatttagaaaaataaacaaataggggttccgcgcacatttccccgaaaagtgccacctgggtccttttcatcacgtgctataaaaataattataatttaaattttttaatataaatatataaattaaaaatagaaagtaaaaaaagaaattaaagaaaaaatagtttttgttttccgaagatgtaaaagactctagggggatcgccaacaaatactaccttttatcttgctcttcctgctctcaggtattaatgccgaattgtttcatcttgtctgtgtagaagaccacacacgaaaatcctgtgattttacattttacttatcgttaatcgaatgtatatctatttaatctgcttttcttgtctaataaatatatatgtaaagtacgctttttgttgaaattttttaaacctttgtttatttttttttcttcattccgtaactcttctaccttctttatttactttctaaaatccaaatacaaaacataaaaataaataaacacagagtaaattcccaaattattccatcattaaaagatacgaggcgcgtgtaagttacaggcaagcgatccgtcctaagaaaccattattatcatgacattaacctataaaaataggcgtatcacgaggccctttcgtc

SEQ ID NO: 362 - DNA, 43 bp, Artificial Sequence
  OT1595 primer
gatcactagtttaaacaatgagtgtgtctaccgccaagaggtc

SEQ ID NO: 363 - DNA, 60 bp, Artificial Sequence
  OT1596 primer
tgagccactcgagggcctgcagggccttagttcatatgcttattcaaagctaattgaacg

SEQ ID NO: 364 - DNA, 7935 bp, Artificial Sequence
  pRS413-GPM1-YAP1 plasmid
tcgcgcgtttcggtgatgacggtgaaaacctctgacacatgcagctcccggagacggtcacagcttgtctgtaagcggatgccgggagcagacaagcccgtcagggcgcgtcagcgcgtgttggcgggtgtcggggctggcttaactatgcggcatcagagcagattgtactgagagtgcaccataaattcccgttttaagagcttggtgagcgctaggagtcactgccaggtatcgtttgaacacggcattagtcagggaagtcataacacagtcctttcccgcaattttctttttctattactcttggcctcctctagtacactctatatttttttatgcctcggtaatgattttcatttttttttttcccctagcggatgactctttttttttcttagcgattggcattatcacataatgaattatacattatataaagtaatgtgatttcttcgaagaatatactaaaaaatgagcaggcaagataaacgaaggcaaagatgacagagcagaaagccctagtaaagcgtattacaaatgaaaccaagattcagattgcgatctctttaaagggtggtcccctagcgatagagcactcgatcttcccagaaaaagaggcagaagcagtagcagaacaggccacacaatcgcaagtgattaacgtccacacaggtatagggtttctggaccatatgatacatgctctggccaagcattccggctggtcgctaatcgttgagtgcattggtgacttacacatagacgaccatcacaccactgaagactgcgggattgctctcggtcaagcttttaaagaggccctactggcgcgtggagtaaaaaggtttggatcaggatttgcgcctttggatgaggcactttccagagcggtggtagatctttcgaacaggccgtacgcagttgtcgaacttggtttgcaaagggagaaagtaggagatctctcttgcgagatgatcccgcattttcttgaaagctttgcagaggctagcagaattaccctccacgttgattgtctgcgaggcaagaatgatcatcaccgtagtgagagtgcgttcaaggctcttgcggttgccataagagaagccacctcgcccaatggtaccaacgatgttccctccaccaaaggtgttcttatgtagtgacaccgattatttaaagctgcagcatacgatatatatacatgtgtatatatgtatacctatgaatgtcagtaagtatgtatacgaacagtatgatactgaagatgacaaggtaatgcatcattctatacgtgtcattctgaacgaggcgcgctttccttttttctttttgctttttctttttttttctcttgaactcgacggatctatgcggtgtgaaataccgcacagatgcgtaaggagaaaataccgcatcaggaaattgtaaacgttaatattttgttaaaattcgcgttaaatttttgttaaatcagctcattttttaaccaataggccgaaatcggcaaaatcccttataaatcaaaagaatagaccgagatagggttgagtgttgttccagtttggaacaagagtccactattaaagaacgtggactccaacgtcaaagggcgaaaaaccgtctatcagggcgatggcccactacgtgaaccatcaccctaatcaagttttttggggtcgaggtgccgtaaagcactaaatcggaaccctaaagggagcccccgatttagagcttgacggggaaagccggcgaacgtggcgagaaaggaagggaagaaagcgaaaggagcgggcgctagggcgctggcaagtgtagcggtcacgctgcgcgtaaccaccacacccgccgcgcttaatgcgccgctacagggcgcgtcgcgccattcgccattcaggctgcgcaactgttgggaagggcgatcggtgcgggcctcttcgctattacgccagctggcgaaagggggatgtgctgcaaggcgattaagttgggtaacgccagggttttcccagtcacgacgttgtaaaacgacggccagtgagcgcgcgtaatacgactcactatagggcgaattgggtaccgggccccccctcgaggtcgacgcggccgcggcgcgccgcttgcatttagtcgtgcaatgtatgactttaagatttgtgagcaggaagaaaagggagaatcttctaacgataaacccttgaaaaactgggtagactacgctatgttgagttgctacgcaggctgcacaattacacgagaatgctcccgcctaggatttaaggctaagggacgtgcaatgcagacgacagatctaaatgaccgtgtcggtgaagtgttcgccaaacttttcggttaacacatgcagtgatgcacgcgcgatggtgctaagttacatatatatatatatatatatagccatagtgatgtctaagtaacctttatggtatatttcttaatgtggaaagatactagcgcgcgcacccacacacaagcttcgtcttttcttgaagaaaagaggaagctcgctaaatgggattccactttccgttccctgccagctgatggaaaaaggttagtggaacgatgaagaataaaaagagagatccactgaggtgaaatttcagctgacagcgagtttcatgatcgtgatgaacaatggtaacgagttgtggctgttgccagggagggtggttctcaacttttaatgtatggccaaatcgctacttgggtttgttatataacaaagaagaaataatgaactgattctcttcctccttcttgtcctttcttaattctgttgtaattaccttcctttgtaattttttttgtaattattcttcttaataatccaaacaaacacacatattacaatagtttaaacatgagtgtgtctaccgccaagaggtcgctggatgtcgtttctccgggttcattagcggagtttgagggttcaaaatctcgtcacgatgaaatagaaaatgaacatagacgtactagtacacgtgatggcgaggatagcgagcaaccgaagaagaagggtagcaaaactagcaaaaagcaagatttggatcctgaaactaagcagaagaggactgcccaaaatcgggccgctcaaagagcttttagggaacgtaaggagaggaagatgaaggaattggagaagaaggtacaaagtttagagagtattcagcagcaaaatgaagtggaagctacttttttgagggaccagttaatcactctggtgaatgagttaaaaaaatatagaccagagacaagaaatgactcaaaagtgctggaatatttagcaaggcgagatcctaatttgcatttttcaaaaaataacgttaaccacagcaatagcgagccaattgacacacccaatgatgacatacaagaaaatgttaaacaaaagatgaatttcacgtttcaatatccgcttgataacgacaacgacaacgactacagtaaaaatgtggggaaacaattaccttcaccaaatgatccaagtcattcggctcctatgcctataaatcagacacaaaagaaattaagtgacgctacagattcctccagcgctactttggattccctttcaaatagtaacgatgttcttaataacacaccaaactcctccacttcgatggattggttagataatgtaatatatactaacaggtttgtgtcaggtgatgatggcagcaatagtaaaactaagaatttagacagtaatatgttttctaatgactttaattttgaaaaccaatttgatgaacaagtttcggagttttgttcgaaaatgaaccaggtatgtggaacaaggcaatgtcccattcccaagaaacccatctcggctcttgataaagaagttttcgcgtcatcttctatactaagttcaaattctcctgctttaacaaatacttgggaatcacattctaatattacagataatactcctgctaatgtcactgctactgatgctactaaatatgaaaattccttctccggttttggccgacttggtttcgatatgagtgccaatcattacgtcgtgaatgataatagcactggtagcactgatagcactggtagcactgatagcactggtagcactggcaataagaacaaaaagaacaataataatagcgatgatgtactcccattcatatccgagtcaccgtttgatatgaaccaagttactaatttttttagtccgggatctaccggcatcggcaataatgctgcctctaacaccaatcccagcctactgcaaagcagcaaagaggatataccttttatcaacgcaaatctggctttcccagacgacaattcaactaatattcaattacaacctttctctgaatctcaatctcaaaataagtctgactacgacatgttttttagagattcatcgaaggaaggtaacaatttatttggagagtttttagaggatgacgatgatgacaaaaaagccgctaatatgtcagacgatgagtcaagtttaatcaagaaccagttaattaacgaagaaccagagcttccgaaacaatatctacaatcggtaccaggaaatgaaagcgaaatctcacaaaaaaatggcagtagtttacagaatgctgacaagatcaataatggtaatgataacgataatgataatgatgtcgttccatctaaggaaggctctttactaaggtgttcggaaatttgggatagaataacaacacatccgaaatactcagatattgatgtcgatggtttatgttccgagctaatggcaaaggcaaaatgttcagaaagaggggttgtcatcaatgcagaagacgttcaattagctttgaataagcatatgaactaaggccctgcaggccctcgagtggctcatgtaattagttatgtcacgcttacattcacgccctccccccacatccgctctaaccgaaaaggaaggagttagacaacctgaagtctaggtccctatttatttttttatagttatgttagtattaagaacgttatttatatttcaaatttttcttttttttctgtacagacgcgtgtacgcatgtaacattatactgaaaaccttgcttgagaaggttttgggacgctcgaaggctttaatttgcgggcggccgcaccgcggtggagctccagcttttgttccctttagtgagggttaattgcgcgcttggcgtaatcatggtcatagctgtttcctgtgtgaaattgttatccgctcacaattccacacaacataggagccggaagcataaagtgtaaagcctggggtgcctaatgagtgaggtaactcacattaattgcgttgcgctcactgcccgctttccagtcgggaaacctgtcgtgccagctgcattaatgaatcggccaacgcgcggggagaggcggtttgcgtattgggcgctcttccgcttcctcgctcactgactcgctgcgctcggtcgttcggctgcggcgagcggtatcagctcactcaaaggcggtaatacggttatccacagaatcaggggataacgcaggaaagaacatgtgagcaaaaggccagcaaaaggccaggaaccgtaaaaaggccgcgttgctggcgtttttccataggctccgcccccctgacgagcatcacaaaaatcgacgctcaagtcagaggtggcgaaacccgacaggactataaagataccaggcgtttccccctggaagctccctcgtgcgctctcctgttccgaccctgccgcttaccggatacctgtccgcctttctcccttcgggaagcgtggcgctttctcatagctcacgctgtaggtatctcagttcggtgtaggtcgttcgctccaagctgggctgtgtgcacgaaccccccgttcagcccgaccgctgcgccttatccggtaactatcgtcttgagtccaacccggtaagacacgacttatcgccactggcagcagccactggtaacaggattagcagagcgaggtatgtaggcggtgctacagagttcttgaagtggtggcctaactacggctacactagaaggacagtatttggtatctgcgctctgctgaagccagttaccttcggaaaaagagttggtagctcttgatccggcaaacaaaccaccgctggtagcggtggtttttttgtttgcaagcagcagattacgcgcagaaaaaaaggatctcaagaagatcctttgatcttttctacggggtctgacgctcagtggaacgaaaactcacgttaagggattttggtcatgagattatcaaaaaggatcttcacctagatccttttaaattaaaaatgaagttttaaatcaatctaaagtatatatgagtaaacttggtctgacagttaccaatgcttaatcagtgaggcacctatctcagcgatctgtctatttcgttcatccatagttgcctgactccccgtcgtgtagataactacgatacgggagggcttaccatctggccccagtgctgcaatgataccgcgagacccacgctcaccggctccagatttatcagcaataaaccagccagccggaagggccgagcgcagaagtggtcctgcaactttatccgcctccatccagtctattaattgttgccgggaagctagagtaagtagttcgccagttaatagtttgcgcaacgttgttgccattgctacaggcatcgtggtgtcacgctcgtcgtttggtatggcttcattcagctccggttcccaacgatcaaggcgagttacatgatcccccatgttgtgcaaaaaagcggttagctccttcggtcctccgatcgttgtcagaagtaagttggccgcagtgttatcactcatggttatggcagcactgcataattctcttactgtcatgccatccgtaagatgcttttctgtgactggtgagtactcaaccaagtcattctgagaatagtgtatgcggcgaccgagttgctcttgcccggcgtcaatacgggataataccgcgccacatagcagaactttaaaagtgctcatcattggaaaacgttcttcggggcgaaaactctcaaggatcttaccgctgttgagatccagttcgatgtaacccactcgtgcacccaactgatcttcagcatcttttactttcaccagcgtttctgggtgagcaaaaacaggaaggcaaaatgccgcaaaaaagggaataagggcgacacggaaatgttgaatactcatactcttcctttttcaatattattgaagcatttatcagggttattgtctcatgagcggatacatatttgaatgtatttagaaaaataaacaaataggggttccgcgcacatttccccgaaaagtgccacctgggtccttttcatcacgtgctataaaaataattataatttaaattttttaatataaatatataaattaaaaatagaaagtaaaaaaagaaattaaagaaaaaatagtttttgttttccgaagatgtaaaagactctagggggatcgccaacaaatactaccttttatcttgctcttcctgctctcaggtattaatgccgaattgtttcatcttgtctgtgtagaagaccacacacgaaaatcctgtgattttacattttacttatcgttaatcgaatgtatatctatttaatctgcttttcttgtctaataaatatatatgtaaagtacgctttttgttgaaattttttaaacctttgtttatttttttttcttcattccgtaactcttctaccttctttatttactttctaaaatccaaatacaaaacataaaaataaataaacacagagtaaattcccaaattattccatcattaaaagatacgaggcgcgtgtaagttacaggcaagcgatccgtcctaagaaaccattattatcatgacattaacctataaaaataggcgtatcacgaggccctttcgtc

SEQ ID NO: 365 - DNA, 18 bp, Artificial Sequence
  Repeat insertion
actctaccggttctaccg

SEQ ID NO: 366 - DNA, 30 bp, Artificial Sequence
  OT1713 primer
gtgctatcagtgctaccagtgctatcagtg

SEQ ID NO: 367 - DNA, 100 bp, Artificial Sequence
  OT1695 primer
cactgatagcactggtagcactgatagcactggtagcactgactctaccggttctaccggcaataagaacaaaaagaacaataataatagcgatgatgta

1. A recombinant host cell comprising a modified yeast activator protein and/or yeast activator protein activity, wherein the host cell produces an alcohol.

2. The recombinant host cell of claim 1, wherein the recombinant host cell comprises a modification in a polynucleotide encoding a polypeptide having yeast activator protein activity.

3. (canceled)

4. The recombinant host cell of claim 2, wherein the polypeptide having yeast activator protein activity is Yap1, Yap2, Yap3, Yap4, Yap5, Yap6, Yap7, or Yap8.

5. The recombinant host cell of claim 2, wherein the recombinant host cell comprises an amino acid substitution at residues 80, 132, 168, 237, 254, 257, 297, 302, 367, 404, 411, 444, 487, 498, 499, 548, 584, 617, and/or 636.

6. (canceled)

7. The recombinant host cell of claim 1, wherein the recombinant host cell comprises one or more sequences selected from SEQ ID NO: 2, 3, 4, 5, 6, 7, 8, 9, 10, 11, 12, 13, 14, 15, 16, 17, 18, 19, 20, 21, 22, 23, 24, 25, 26, and 27.

8. The recombinant host cell of claim 2, wherein the recombinant host cell comprises one or more amino acid insertions.

9. The recombinant host cell of claim 8, wherein the recombinant host cell comprises one or more amino acid insertions of tripeptide repeat units selected from Ser-Thr-Asp and Ser-Asp-Gly.

10. The recombinant host cell of claim 1, wherein the recombinant host cell further comprises an butanol biosynthetic pathway.

11. The recombinant host cell of claim 10, wherein the butanol biosynthetic pathway is an isobutanol biosynthetic pathway.

12. (canceled)

13. (canceled)

14. The recombinant host cell of claim 10, wherein the recombinant host cell further comprises a modification in a polynucleotide encoding a polypeptide having pyruvate decarboxylase activity.

15. (canceled)

16. The recombinant host cell of claim 14, wherein the polypeptide having pyruvate decarboxylase activity is selected from the group consisting of: PDC1, PDC5, PDC6, and combinations thereof.

17. (canceled)

18. The recombinant host cell of claim 1, wherein the recombinant host cell is a yeast cell.

19. The recombinant host cell of claim 18, wherein the yeast cell is a member of a genus of yeast selected from the group consisting of: Saccharomyces, Schizosaccharomyces, Hansenula, Candida, Kluyveromyces, Yarrowia, Issatchenkia, and Pichia.

20. A recombinant host cell comprising one or more modified components of a stress pathway and/or activity of components of a stress pathway, wherein the host cell produces an alcohol.

21. The recombinant host cell of claim 20, wherein the recombinant host cell comprises a modification in a polynucleotide encoding a polypeptide having activity of components of a stress pathway.

22. (canceled)

23. The recombinant host cell of claim 21, wherein the polypeptide is selected from Yap1, Yap2, Yap3, Yap4, Yap5, Yap6, Yap7, Yap8, Ybp1, Trx2, Gsh1, Gsh2, Trr1, Gpx2, Tsa1, Ahp1, or Glr1.

24. The recombinant host cell of claim 20, wherein the recombinant host cell further comprises an butanol biosynthetic pathway.

25. The recombinant host cell of claim 24, wherein the butanol biosynthetic pathway is an isobutanol biosynthetic pathway.

26. (canceled)

27. (canceled)

28. The recombinant host cell of claim 20, wherein the recombinant host cell further comprises a modification in a polynucleotide encoding a polypeptide having pyruvate decarboxylase activity.

29. (canceled)

30. The recombinant host cell of claim 28, wherein the polypeptide having pyruvate decarboxylase activity is selected from the group consisting of: PDC1, PDC5, PDC6, and combinations thereof.

31. (canceled)

32. The recombinant host cell of claim 20, wherein the recombinant host cell is a yeast cell.

33. (canceled)

34. A method for improving cell viability comprising modifying one or more components of a stress response pathway.

35. The method of claim 34, wherein one or more components of a stress response pathway are selected from Yap1, Yap2, Yap3, Yap4, Yap5, Yap6, Yap7, Yap8, Ybp1, Trx2, Gsh1, Gsh2, Trr1, Gpx2, Tsa1, Ahp1, or Glr1.

36. A process for producing an alcohol comprising
(a) providing the recombinant host cell of claim 1, wherein the host cell produces an alcohol;
(b) contacting the recombinant host cell with one or more carbon substrates under conditions wherein the alcohol is produced; and
(c) recovering the alcohol.

37. The process of claim 36, wherein the alcohol is selected from methanol, ethanol, propanol, butanol, pentanol, and hexanol.

38-40. (canceled)

41. An isolated polynucleotide comprising a nucleotide sequence selected from the group consisting of:
a) a nucleotide sequence encoding the polypeptide set forth in SEQ ID NO: 2-38;
b) a nucleotide sequence encoding a polypeptide having at least 95% sequence identity to SEQ ID NO: 2-38;
wherein the polynucleotide encodes a polypeptide that when expressed in a host cell thereof improves the tolerance of the host cell to oxidative stress.

42. An expression cassette comprising the isolated polynucleotide of claim 41, wherein the polynucleotide is operably linked to a promoter.

43. A composition comprising the recombinant host cell of claim 1.
